United States Patent Application Publication US 2026/0357304 A1, published November 12, 2026 (application 19/480,878).

The application's sequence listing, which the Patent Office published only in electronic form, follows.

SEQUENCE LISTING (299 sequences)

SEQ ID NO: 1 - protein, 345 aa, Mariniphaga sediminis
MKALVLDEYNQLNYRDFPEPEIHSGEVLIEIKACGICGSDVHGMDGSTGRRKPPLVMGHEASGVIIETGSDVKNWKTGDRVTFDSTVYPLNDWFTLKGHYNLSNNRQVLGVSPGEYRRHGAFAERLAVPQHILHRIPENVSFVEAAMVEPIAVAAHAVNVSGLKPGNSAMVAGAGMVGVFVVQLLKLFGANPVVVIDIDHKKLKLAHEFGADFTFNPKEKDIDERILQLTKSRGFDLTFEVVGITETVQTCITNTRKGGTVVLVGNLSPEIQFPLQKVVTSEITVQGSCAIKGEYELALDLLAAKKVDVSKLVSAVAPLSEGAEWFKRLYEKEPGLNKVILIPDK

SEQ ID NO: 2 - protein, 325 aa, unidentified
  source 1..325: note = Candidatus Dormibacteraeota bacterium
MKAMVWLGPERMEVRDLPAPRPGAGEVLVQTEAAGICGSEVEAYLGRMANRTPPLVMGHEYAGLVTEVGEGVDRVWSRRRVAVNPIVGCGRCRNCAAGDRNLCPDRHLLGIAAPGGFAAFSVVPERCLFSLPEGMDARLGALTKPLANGVHLIRKSGAGRGRVVVIGAGTIGLGCLQAALLHGAEQVDVVERHPGRRRHALALGARQAVAELADVEPGADLVVDAAGSEATRRAAVELVGPAGTASFVGLHSDETVLPWHRIIRANIRVQGTFGYADRDFQQALDWLAAGKAAIPLSELRPLDDGPAAFERLARGPIDEIKVFLA

SEQ ID NO: 3 - protein, 337 aa, unidentified
  source 1..337: note = Candidatus Falkowbacteria bacterium
MKSLIYYGPHDLRYGDSPKPKIRSGEVLLRIKSVGICGTDLHIYNGGMKNLPLPLIMGHEFSGVIEELARDVKNFKVGDRVIAEHVINCGKCSYCLSGKPNLCANSRIIGVHRPGALAEYLAVPADLVYKIPAKLSFEEGAMIEPLSIAYYAVKQARSILGKKVAVIGQGPIGLLLDQILRDAGAEVIGIDIADWRLKLAKKKKWADHTINSSQKTWLKKIQKIAPEGVDTVFEVVGREETAEMAIEIARRDGDVFILGVFESAASLNMMNIVKKELNVFGSWTCAFSFPPSIALAVAKKVDLKSLITNRYDVKDGALAFKESASYKGKRIKTVINF

SEQ ID NO: 4 - protein, 347 aa, unidentified
  source 1..347: note = Acidobacteria bacterium
MKAMLLSQYRRLEIAELPTPIPGRGELLIHVAACGICGSDVHGYDGSSGRRIPPIVMGHEAAGRVAALGPQVTGWSEGDRVTFDSTISCGTCPYCSRGEINLCDRRQVLGVSCGDYRCAGAFAEYVIVPQRIAYKLPDALSFSEAATLEAVAVAVHAVSLSQVSPGTQALVIGAGMIGLLTLQALRAAGCSSVVIADVDASRLRLAKEVGATETLNATGDEFVAEIFKRTNGAGTDLAVEAVGIDATVRTAINSVRKGGTVTLVGNITPEVTLPLQKVVTRQIRIQGSCASAGEYPRAIQLLTSGAIKVKPLITAVAPLEDGPQWFERLYSREPNLMKVVLTPGSVS

SEQ ID NO: 5 - protein, 344 aa, unidentified
  source 1..344: note = Spirochaetaceae bacterium
MKAMVLKEYKYLEIEDIPIPHIEAADELLVRVKATAICGSDIHGFDGSTGRRKPPLVMGHEASGVVESVGSEVKSLKIGDRVTFDSTVWCGECYFCRQGQVNLCDKRRVLGVSCDEYRKDGTFAEYVIVPERIVYKLPDNVAFEEAALTEPVSVAMHAFDITGMKPGENAAVIGSGLIGLLLIQIIRAYSPHLIIAFDTDEKRRKAAIEAGADIALDPQDPESHKTVLSMTNNRGVDRAFEAVGASAAIGTAIESVRKGSSVTLIGNISNKAEIPLQSVVTRQIALLGSCAISGEYPVSLALMANRTIDVRQVISAIAPLEEGPLWFERLYKREPGLLKVVLTP

SEQ ID NO: 6 - protein, 348 aa, unidentified
  source 1..348: note = Candidatus Hydrogenedentes bacterium
MKALRLYAPGDLRLEEIPIPLPRPDEVLVRVLACGICGSDIPRVFEHGTYKYPLVPGHEFSGIVEKVGSETGKDWVGRHVVVYPLIPCRQCSSCYSGLYTQCLNYDYLGSRRDGGFAEYVTVPVNNIIPVPNGISGEISAITEPCAVALHAVRKAQACVGDTVLITGAGTIGILIALWARAAGAEVFMTDIVVGKLKLARSLGFQHLLDAKQTNVSEWVKQKCKHGVDIVFETTGHPAGLETSIDSCSITGKIILVGNPSFEEMKVPAKQYGMILRKEIQITGIWNSLINEYPKNEWQVVLQEFKKESSLYSKIITHKVPIEGLKELFVTIYNKQVFPVKAMFINKEI

SEQ ID NO: 7 - protein, 337 aa, Rhizobium sp.
MKAVVYTQPDAVAVLEREMPALVPGEVLLRIDASGICGSDLHAYHGHDPRRKPGLVLGHEFAGTVVASSDESRLPVGRRVTANPLVTCGHCDYCLQGRDNLCANRGMVGMSRPGALSEYLAIPMRCAIAIPEDLPSVSAALTEPAATALHAVNLTMRAMSRPLPEARVLIIGGGAIGMLTGALVGAYGCRSLAVAETNALRRASVRRHLACEVLDPTANAPAESSFDVVIDAVGAAPTRHLALAATRPGGVIMHIGLQAWSSEIDMRKLTLAEITLLGTYTYTMADMHATVRALASGSFGSLEWVETRALTDAPSAFADLAAGRVAAGKVVLLPQQD

SEQ ID NO: 8 - protein, 347 aa, Citrobacter freundii
MKSVVIHAEGDVRVEERPIPHLQTDEDVLVKVVSSGLCGSDIPRIFNRGAHYYPITLGHEFSGYVESYGAGVTDLQPGDAVACVPLLPCFHCPQCERGYFSLCKQYQFVGSRSEGGNAEYVVMKRANLFRLPSDMPIEDGAFIEPITVGLHAFHLAQGCEGKNVIIVGAGTIGLLALQCARELGAKSITAIDINPQKLALAKELGATYVFNSREMSATEIHSDLENVQFDQLILETAGTPQTVTLSIEIAGPRAQLALVGTLHHDLALASGVFGQILRKELTILGSWMNYSSPWPGEEWVTAARLLTEKRLQLEPLIAHSGDAESFASAVKSLNGAPMQGKILLKLS

SEQ ID NO: 9 - protein, 346 aa, Escherichia coli
MKSVVNDTDGIVRIAESVIPEIKHQDQVRVKIASSGLCGSDLPRIFKNGAHYYPITLGHEFSGYIDAVGSGVDDLHPGDAVACVPLLPCFTCPECLKGFYSQCAKYDFIGSRRDGGFAEYIVVKRKNVFALPTDMSIEDGAFIEPITVGLHAFHLAQGCENKNVIIIGAGTIGLLAIQCAVALGAKSVTAIDISSEKLALAKSFGAMLTFNSLEMSAPQMQGVLRELRFNQLILETAGVPKTVELAVEIAGPHAQLALVGTLHQDLHLTSTTFGKILRKELTVIGSWMNYSSPWPGQEWETASRLLTERKLSLEPLIAHRGSFESFAQAVRDIARNAMPGKVLLIP

SEQ ID NO: 10 - protein, 339 aa, Escherichia coli
  source 1..339: note = Escherichia coli (strain K12)
MKSILIEKPNQLAIVEREIPTPSAGEVRVKVKLAGICGSDSHIYRGHNPFAKYPRVIGHEFFGVIDAVGEGVESARVGERVAVDPVVSCGHCYPCSIGKPNVCTTLAVLGVHADGGFSEYAVVPAKNAWKIPEAVADQYAVMIEPFTIAANVTGHGQPTENDTVLVYGAGPIGLTIVQVLKGVYNVKNVIVADRIDERLEKAKESGADWAINNSQTPLGEIFTEKGIKPTLIIDAACHPSILKEAVTLASPAARIVLMGFSSEPSEVIQQGITGKELSIFSSRLNANKFPIVIDWLSKGLIKPEKLITHTFDFQHVADAISLFEQDQKHCCKVLLTFSE

SEQ ID NO: 11 - protein, 357 aa, Lactobacillus salivarius
  source 1..357: note = Lactobacillus salivarius cp400
MNIPTKMKAVVKSEAGYDNMSLQEIPVPEVKGKQVLMKVAYTGICGTDIHTFKGEYANAVTPLVLGHEFSGKVVAVGDEVTKVKPGDRVTSETTFDTCGECVYCKNKEYNLCENRSGIGTKANGSMANYVLTREESVHVLPDNVSYKLAAMSEPLASCVHAMYQKTPFTLHDTVLIIGPGPMGLLSLQIAKEIGAFTIVSGITKDSDRLEIAKELGADIVVDTQKEDLAKIVMEATNGVGVTKVYDCSGATPAVNAALPLLKKGGTFQQVGLFAKPLNELDERTIIQHEITYVGSRSQNPYDWPIAIHLEAKGAINEDKMVTKVFDLDHWREAFEAMMAGKELKVLIASNPDDETLN

SEQ ID NO: 12 - protein, 350 aa, Clostridium difficile
MKAAVLHGTNDMRFEDIEIKPCESDEVKIKVMAAGICGSDPPRVLKHWKYPVPAIPGHEFSGVIAEVGKDVKNVKVGDRVVAIPFIPCNECEYCKRGLFSLCDDHGMLGAKSFGAFAEYVNIKATNVLPIGDMDFEDAAMIEPLAVAMHGVLNIGVQVGDTVAVMGSGTMGQLVIQGLKIAGAGTIIAVDISDNKLRESKELGADIIINAKDINPVEKIKELTGGKGVDIALECAGSKITQEQCLLITKKKSKIGFLGIAYSDITLSEEAFENIFRKELELKGFWNSYSAPFPGQEWTKGINLVNEGKIKLKEMVSHRFSLEDTYKAFEMIRDRKEEFNKILILPQGVEK

SEQ ID NO: 13 - protein, 350 aa, Clostridium difficile
MKSVRFYGIRDTRVEDVDVPKILEKDDVIIKVKVAGICGSDISKYSKTGPHMVGEILGHEFSGEVAQVGKEVRSFKIGDRVAVCPAMPCFECDECKKGLYSRCNNVAIIGNKELGGCFAEYTKVKERNLIKIPDEISYETAAALEPVCIAGHGLFRSEAKVGDTVVVLGTGPIGLFSIQWAKIFGSTKIIAVDVFDEKLDLAKELGADICINAKEKNIVEEIKRLTDGDGADIVIESAGTPLTCGQVLLLAKKGGTVLYAGVPYGDVALTREQFEKIVRSELTVKGTWFGNSFPFPGKEWSAGLYHMQKGDMNVEKLVTHRINLEEAPAYFEKVYKRDIFFGKIMINIDN

SEQ ID NO: 14 - protein, 349 aa, Lactobacillus rhamnosus
MKASMLEDLNKFSVKEIDIPSPKKDEVVVKVMAAGTCGSDSHKMISGWKYGYPAVMGHEFSGIVTQLGENVSNVSVGQHVAVAPFIPCFKCHYCQIGLFQMCENYSMLGQQKFGGFEQYVSVPARNVLDIGKMSFEEGALIEPMAVAAHAVMGIKPELGDTVAVFGLGTVGDLVVRLLISSGATNVIGIDIDDQKLEKGLDEGCTHVINSAKESLEEKIMEYTDGLGVDISMECAGSKITEEQTLLVTKRRGKVGFVGIAYSDVLLHQKAFENIFRHELTVTGFWNSYSAPFPGREWTNSIQLVNRGRIKIKDLITHRFELEDMQKAFNMITTRSESFNKVMFFPNGIN

SEQ ID NO: 15 - protein, 354 aa, Bacillus halodurans
MKALNLYGIQDLRFEETPAPSIEHDDDIIIKVKAVGICGSDLSRYKKLGPYVPGMTFGHEFAGEVVKIGRSVTGFSIGDRVAACPTYTCGQCRYCQLGEPTRCERLSVIGARHPGAYAEYVKLPAKHVIPLPNVVNYDEAALIEPASVVAHGFYRTNIKPGASVAIMGVGSIGLLAVQWAKIFGATTVFAIDIDEQKLNVANQLGADVLISSLQRPAHKQILEYTNGIGVDVAVESAGTPSTSAQVFALPKKGGEVVFLGIPYADVQIERFYFEKIVRNELHVYGSWNALSSPFPGKEWATTIHYMSSGQLNVAPMISYRLPLAKGPETFQQIAKGELKPTKVLFYPEKLSERK

SEQ ID NO: 16 - protein, 351 aa, unidentified
  source 1..351: note = Lachnospiraceae bacterium
MKVLSLHKPGDIRFEDAPMPEPGEGEVLLKVMACGVCSSDEARIFKDGAHIMPIVPGHEFCGQVVKTGAGVDESLIGRKASVFPMLPCFECPSCKRGDYATCSNYKYYGSRNDGGMGEYRAIKAWNLNLLDDSVDYCVGALSEPSAVGHHATEVGGVKAGDKVFVIGSGTIGLLIGFFAQAKGAEVWIGARRKESNDFAASLGFKTIDTNNTEDEVAKATDGNGMDVVFEAVGSNKCLIEAIGSVTAGGTLVTVGNPVGDMNLPRDVYWRILRKQLTVRGTWNSSYSDKANDWHEVAALMKEKKIPFEKLITRKYKLSQCDEAFDFFRDHSIQKSRVMFVMHEKESEAYNG

SEQ ID NO: 17 - protein, 336 aa, Faecalibacterium sp.
  source 1..336: note = Faecalibacterium sp. OF03-6AC
MVNMMKALVFTAPHTFEYRDVPRPEPAPDEVLVEVKACAICGSDVHGSSGENGRRIPPLVMGHEASGTIAQLGEAVQSWAVGDRVTFDSTEYCGYCWFCTHGMHNLCAQRRIVGVACTEYRKNGAMAQYIAVKARTLYALPPAVSFEQGCLVEPFAVGMHAVLRSGLAAGQTAAVIGDGTIGLMTLIAAKSQGAQVCISGHHTRPMQLAAQLGALDCAQLPQLTAERGADVVYDAVGSQSSFTQAMELVRKGGRIMVIGNHARTIDFPLQRCITEQIDVQFSYSSAGEYPVCLQAIAEGRADLTGLWQSFPLAEGAQVFDRLVHRDESLTKAVLIP

SEQ ID NO: 18 - protein, 357 aa, Agathobacter ruminis
MKAYVLDGIGQLNQHEYVLRDLQPGEALVQVAAAGICGSDLPRIFETGTYHFPTIPGHEFAGVVKELYADADEEMLRQWMGKRVAVFPLIPCRTCRSCANHQYEMCSNYNYLGSRTDGGFAEYCIVPVWNLLQLPDEVSFAQAAMMEPAAVALHAIRRGGLHPDHPETGIGKRVLVMGLGTIGGLIAQWLSQCGVTELTATGHHAPQEELMHRYANENYRFINTNQTAWTDDENTYDLIFDCINDSESVQQALRYVKPGGQIVAVGNPKKDLTLQKDIYWKLLRKQVCMTGTWNSSFSHDSNDDWQILLRYLQEQKLHPQALITHRLPFAQLPKGLEIMRLREEFYNKIMIDLTVCS

SEQ ID NO: 19 - protein, 342 aa, Alicyclobacillus acidoterrestris
MKAVTYTPDQGFALVEVETPQLGPDEVLLQVEACGVCGSDRQVVAGESVPTGTAFPLVMGHEIAGRIAALGETVTDWHVGDSVIVHPFVACGTCAPCVHGQPNLCVRQVCIGYQRPGGFAEQVAVPARQLVRRPAELAPAAAALVVDAFATPYHAMRAAGVESGQTVLIIGTGGLGLAALMLAMGFHVGRLGAVTRRQEGIAIAEAHGAQMVVVTDQDERTIARQLRRWSGASGIDVVIDTVATADTITLAAESVRPGGTIAIVGMSADTALYPVAKTVRRGLTFVASYGSVREDVEQLVSWVAEGRLDPVRLVAGALPLHEAARAFAPDRPAGRWVIDPSE

SEQ ID NO: 20 - protein, 357 aa, Ruminococcus sp.
  source 1..357: note = Ruminococcus sp. KGMB03662
MKSLINIPEKMKALVLYGVGDLRVTEVDVPKLEKGTVLLKIKACGICSSDMPRCFVTGTYHFPTIPGHEFSGQIVAVGDDVDESLLGKRSCVFPMLPCKHCKACKMEEYAQCSGYSYFGSRQDGAWAEYLVVPVWNLVPFDDTLDYKTAALCEPAAVSMHAVNIGDIKEGQNVVIIGTGTIGFMIALFAKERTKTGKVVIAGRSKNKLEYAKKLGFDVVDTSVDDLPAQVKKIIGIDGADVTFEAVGSNEAIASAIESTGALGSIVLVGNPSTDLILPKNIYWSILRKQITVKGSWNSSYNSRVNDWKKALEVFEHSDVNFADLITHTFTIEENEKAFSAIRNTGEFTLKVMFTFDD

SEQ ID NO: 21 - protein, 348 aa, unidentified
  source 1..348: note = Clostridiaceae bacterium
MKAVVLHGKNDICYEEWPEPILKTGTVKIHVKACGICGSDIPRVLGDSAHYYPIILGHEFSGCVTEVADDVDKIQVGDHVAGVPLLPCMKCDDCQQGNYSQCKHYSFIGSREQGGFADYVVIPADNVVKVDPTLPYEQVALFEPCTVALHALKVSSYKGGKRVAILGGGTIGLFALQWAKIYGASQVTVFGRSKEHLKIAAALGADTTISTLDDNFMTEAMRVTEKKGFDYIYESAGSTITMKLAFELAANHAKICFIGTPTENLTFSPKLWENMNRKEFQLMGSWMSCSAPFPGDEWKETAHFFNTGQLRYVPEMFFAQYPMDDVKKAFEQFHNKNKVKGRILLKNK

SEQ ID NO: 22 - protein, 337 aa, unidentified
  source 1..337: note = Thermoplasmata archaeon
MKVAVWYGDKNIVLEDRPIPSIGEKDVLVRVKSSSICGADLHAYKGLSKRRKPPLVMGHEFSGMVERLGDETKGLKVGDRVVVEPIISCGKCKACKKGKTNVCENRKLIGLNLDGAFAEYVSVPYEKCHELPRDLSFDEGAIIEPLAVAVHAVNITPISSNDNVLIIGSGVIGLLITQLLRSRTSGDILVTGRRDYLLEKAREFGATDAINVIDCDAVKTLLKKHGRVDVVFEAVGSNETVNQSISLVESGGSITLVGMLDREMTVDMMEVVAREITLRGDYGYTTDDFKEAIELASSGKVDLKGLITHVLPLDEIKKGFDILAERRENVIKVVINP

SEQ ID NO: 23 - protein, 343 aa, unidentified
  source 1..343: note = Lachnospiraceae bacterium
MKALVLEEIGKLTLKEVETPVPGRGEVLLRIHACGICSSDKARLFKNGTHTMPLIPGHEISGEIVAGGPGIREELIGRRAAVFPLIPCRQCDSCRIGKYAQCEHYDYFGSRRDGGFAEYLAVPVFNINLLPDDMDYHTAALCEPATVASHALKRAKMKSGDIVTIIGTGTVGLLAAGIARIRRASKIIIVGRSKEKIMNAAHFADHVINAEGWDVNEAVASLTEGHMSDVVLETGGNSDACTYALMAAGKGTTVMFIGNPEEPIVFNRDIYWKILRNELTLKGTWNSGYAPEDNDWNDVIRYMADGQIPADKIITDSFPLEDYNKAFELLLSDRFYTKIMFDI

SEQ ID NO: 24 - protein, 348 aa, Prevotella marshii
  source 1..348: note = Prevotella marshii DSM 16973 = JCM 13450
MKANVLYHIGDLRYTDVALPELHDGEALVRVRACGICGSDVARVFTTGTYHFPTIIGHEFSGEVVETYSAADAEWVGRRVSVFPLIPCRHCDACHHGQYEMCTCYNYLGSRTDGGFAEYVAVPVWNLFRLPDSVSYEEGAMMEPAAVAMHALKIARVGMGDTVAITGPGTIGMILTQLIQRIGGTKAVLIGRTQAKLDYARRIGIRHVCNSGTEHVADRVGQLTGGRGADIAIEGTGASEPMNLCLNLVRSEGRIVAMGNPQGDMLFRKDAYWKLLRKQLTLRGTWNSTYGLGRDDWQDISALLAEGALNLRGLITHRLPLAELQQGLSLMRDAAVYTNKVMIVDEQG

SEQ ID NO: 25 - protein, 337 aa, Blautia sp.
  source 1..337: note = Blautia sp. OM05-6
MRAYELHGVNDLRREDIEKPEIPSGWVLVQVKASGICSSDIPRIFTNGTYHFPTIPGHEFSGVVAAYGEGVPEERVGKRVGIFPLIPCRTCPQCRQKKYEMCEHYDYLGSRRDGGFAEYVAVPDWNLLELPENVSFREAAMLEPLSVALHAVKRSGVKPGDTAAVIGTGMIGFAAAAWAKALGAETVFVIGRGEAKRAIAEQIPGISYVTEEESKAIQADVVVEAVGTPQAVSSAVLLARPGGSIVLMGNPSGDLAMEKNVYWRILRKQLNLMGTWNSSYEKDEACDWTEALDALSKKKIPAQALITHCFPSEKLMDGLELMKNHKEPYCKVMVSWE

SEQ ID NO: 26 - protein, 354 aa, unidentified
  source 1..354: note = Candidatus Bathyarchaeota archaeon
MKRMRAAILYGPKDIRIENIEMPKVKPEWVLIKVRATGICGSDLHFYKEKSFIPIISDVGKGRYVPGHEFSGEVYELGSKVKGLKKGDRVGVEPIIGCGKCQWCKVGCYNLCEHYKLIGFHYIGGMAEYCVAPAENCFKLPNNVSFESAAMLDCIAVAIHAVNKAEIRGGDSVLIVGAGAIGLFALQAALIQGASDVYVVGKYEFQLEKARKLGATAVINAKNESFSEKIMEITSGKGVDKVIEAVGGASNVISDVLDVTRKKGTIVTTGIFTRPLSVDFFKILTKELTITSSWGYCYFDRRKEFGTALDFLAKEKINTQELITHKYPLEKVSEAFETALNKNKEKSIKVEIIF

SEQ ID NO: 27 - protein, 350 aa, unidentified
  source 1..350: note = Lachnospiraceae bacterium
MKAWVLHGIGDIQYEEVKEPQSAGDEVIMKVMSVGICGSDIPRIYKTGTYHFPTIPGHEFSGIVADVGAGVNPKWKNKRVGVFPLIPCHVCASCKKGQYEMCRNYGYLGSRQNGGFAEYAAVPVKNLIELPDSVSMQEAAMLEPMAVAVHAMRRARPMTGDRIVVCGLGTIGMLLVSFLRETGIRDIFVIGNKAFQRITILKTGLQENCYCDSRVQDVEKWLMERTEGKGADVFFECVGRNETISQAVNLTAPGGSVCLVGNPCSDMTLEREVYWKILRNQLTITGTWNSSFTHEIEDDWHYVLDRLEQGKISPGDLISHKFPLKNLESGLHIMRDKTQDYIKIMAEINV

SEQ ID NO: 28 - protein, 348 aa, Alkalihalobacillus ligniniphilus
MKAAVLHSENLFTYEEVEIDPCKDDEVKIKVMAAGICGSDTHKMTSKWKYPLPTIMGHEFSGFIVEIGEKVTNASIGDRVVAIPFLPCNDCEYCKRGQFSLCEDHGMVGSKSFGGFAEYVNIKSTNVLPIGDMDFEEAAMIEPLAVALHGVLNIHPRIGDIAAVFGIGTIGILTIQWLKIAGVKEVIAIDISDNKLADAHAMGCERTINPFKENLLEKIDEYTNGRGVDIAFECAGSKVTQEQCLLVTAKRGKVGYLGIAYSDVHLSEQAFENIFRRELTLKGFWNSYSAPFPGEEWTKSIDFINKGRIKLKELISHRFKLQDTQKAFDMMINREETYGKVLILPNKE

SEQ ID NO: 29 - protein, 348 aa, Jeotgalibacillus soli
MKAAVLHSENHFIYEEIDIAPCQDDEVKIKVIATGICGSDTHKMTGKWKYPLPAVMGHEFSGYIVEKGKNVTNAAIGDRVVAIPFLPCNDCEYCKRGQFSLCEDHGMVGSKSFGGFAEYVNIESSNVLPIGDMEFEEAAMIEPLAVALHGVLNIHPRVGDVAAVFGVGTIGMLTIQWLKIAGAKEIIAIDLSDEKLADARAMGCERTINPLNEDLLEKINEYTNGMGVDIAFECAGSKITQEQCLLITRKQGKIGYLGIAYSDVHLSEKAFENIFRRELTLKGFWNSYSAPFPGEEWTKSIEFIKNGRIKLKELISHRFKLEDTQKAFDMMINREEKYGKVLILPNEE

SEQ ID NO: 30 - protein, 350 aa, Heyndrickxia sporothermodurans
MKAAVLHSENEIIYQDIEISECQPNEVKVKVMAAGICGSDTHKMVSKWKYPLPAIMGHEFAGYVVEKGKDVTNVEIGDRVAAIPFIPCNECEYCLRGQFSLCENHGMIGSKSFGAFAEFVNIPAKNVLPIGEMSFEDAAMIEPSAVSLHGVLNIHPQLGDVVAVFGVGTIGILAIQWLRVAGVKEIIAIDISDKKLQDAMDLGCEKSINPLKEDLIKKIYEYTNGLGVDIAFECAGSKITQEQCLLITRKQGKVGYLGIAYSDVTLSEKAFENIFRRELTLKGFWNSYSAPFPGKEWMNTIEFVQQGKIKLKELVSHRYKLEDTQKAFNMMINREEEYNKVMIIPNEELE

SEQ ID NO: 31 - protein, 346 aa, Clostridium fungisolvens
MKAAVLHSVGDIRYENIEIKPYGDDEVKIKVKAAGICGSDPPRALKKWKYPVPAILGHEFSGYIVEVGKNVKGFKVGDRVVAVPLEPCHQCEYCKKGQFSLCESYDMLGATSFGGFAEYANVKATNVLKIDDIDYEEAAMIEPLAVALHGVLNINPQLGDTVAVLGAGTIGQLTIQWLKVSGVEKIIAVDISDKKISEAMSLGADIGINALKENPVEKIMELTNGFGVDICIECAGSKITQEQCLLVTKKKGKIGYQGIGHAGIELSEVAFEGIFRKELNIQGFWNSYSAPFPGQEWFKSIEYVKQKKIKLKQLISHRFSLEDTAKAFEMIGERKEEYNKIMIVQD

SEQ ID NO: 32 - protein, 348 aa, Alkalihalobacillus nanhaiisediminis
MKAAVLHSENHFIYQDMESFECQNDEVKIKVMAAGICGSDTHKMVSKWKYPLPAIMGHEFSGYVVEKGSDVANVEIGDRVVAIPFLPCHTCEYCKSGVYSLCEDHGMIGSKSYGGFAEYVNLKATNVLPIGNMDFEEAAMIEPLAVALHGVLHIQPRLGDVAAVFGVGTIGMLAIQWLKIAGVKEIIAIDISDEKLAEAKAMGCERTINPLQDNLIEKVHEYTNGLGVDVALECAGSKITQEQCLLITRKKGEIGYLGIAYSNVVLSEQAFENIFRKELTLKGFWNCYSAPFPGEEWTKSIDFILKGRIKLKELISHRFPLEETQKAFDLMINRKETYGKVMIIPNKE

SEQ ID NO: 33 - protein, 348 aa, Neobacillus cucumis
MKAAVLHSENQIVFQEFEIGELKPDEVKVKVMAAGICGSDTHKMVSKWKYPLPAIMGHEFAGYIVEKGKDVVHVEVGDRVAGIPFVPCNDCEYCFRGQFSLCENHGMVGSKSFGAFAEYVNIPAKNVLPIGDMDFEDAAMIEPSAVALHGVLNIHPQIGDVVAVFGVGTIGILALQWLKVAGVKEIIAIDISDKKLQDAIALGCERTINPLKENLLEKIHEYTNGLGVDIAIECAGSKITQEQCLLITRKQGKVGYLGIAYSDINLSEKAFENIFRRELKINGFWNSYSAPFPGKEWTNTVEYVKQGKIKLKELISHRFGLEDTQQAFNMIINREEEYNKVMIVPNGE

SEQ ID NO: 34 - protein, 341 aa, Staphylococcus aureus
MINQVYQLVAPRQFDVTYNNVDIYGNHVIVRPLYLSICAADQRYYTGRRDENVLRKKLPMSLVHEAVGEVVFDSKGVFEKGTKVVMVPNTPTEQHHIIAENYLASSYFRSSGYDGFMQDYVVMAHDRIVPLPNDIDLSTISYTELVSVSYHAIQRFERKSIPLKNSFGIWGDGNLGYITAILLRKLYPEAKIYVFGKTDYKLSHFSFVDDIFTVNQIPDDLKIDHAFECVGGKGSQVALQQIVEHISPEGSIALLGVSELPVEVNTRLVLEKGLTLIGSSRSGSKDFEQVVDLYRKYPDIVEKLALLKGHEINVCTLQDIVQAFEMDLSTSWGKTVLKWTI

SEQ ID NO: 35 - protein, 350 aa, Staphylococcus aureus
  source 1..350: note = Staphylococcus aureus subsp. aureus 71193
MLLFEVVLPMINQVYQLVAPRQFEVTYNNVDIYSDYVIVRPLYMSICAADQRYYTGSRDENVLSQKLPMSLIHEGVGEVVFDSKGVFNKGTKVVMVPNTPTEKDDVIAENYLKSSYFRSSGHDGFMQDFVLLNHDRAVPLPDDIDLSIISYTELVTVSLHAIRRFEKKSISNKNTFGIWGDGNLGYITAILLRKLYPESKIYVFGKTDYKLSHFSFVDDVFFINKIPEGLTFDHAFECVGGRGSQSAINQMIDYISPEGSIALLGVSEFPVEVNTRLVLEKGLTLIGSSRSGSKDFQDVVDLYIQYPDIVDKLALLKGQEFEIATINDLTEAFEADLSTSWGKTVLKWIM

SEQ ID NO: 36 - protein, 341 aa, Eubacterium ventriosum
MINTVYQLVAPRRFEIKYSDIDLNNNKVIVRPTYLSICNADQRYYQGLRDAEILRKKLPMALIHEAIGEVVRDPSGNFKTGELVVMVPNTPVEEDDIIAENYLRSSKFRASGFDGFMQEYVEITPDRLVRLPQNIDRTVAAFTEIVSVSVHAIGRFDKIAHKRRNVVGIWGDGNLGYITAVFFKTMFPETKLYIFGVNPDKLQDFTFADATFTVEHIPEDVKIDHAFECVGGAGSGKAINQIIDYINPEGTISILGVSEYPVPINTRMVLEKGLRIFGSSRSGVADFEKTVALYKSNPEIINYLSNIVGAVVPVRTIEDMKKAFEMDIQKAFGKTIMMWDK

SEQ ID NO: 37 - protein, 343 aa, Pradoshia sp.
  source 1..343: note = Pradoshia sp. D12
MINQVYRLVSPRQFEVAYNDRSLQYHEDFVVVRPTHLSICAADQRYYTGSRGKEAMAKKLPMALIHEAIGKVVYDPKGEIKNGTMVVMIPNTPTEKDEVIGENYLRSSKFRSSGYDGFMQDYVFMGRDRIVELPEGIDPYVVAFTELMTITTHVLSRFESRSHKRRNVFGVWGDGNLGFITTLFLKKMYKDCKVIIFGKTGYKLDNFSFVDEVYTIDEIPEDLRIDHAFECVGGKGSQYAIDQMIDHLHPEGSIALMGVSEFPVEVNTRMILEKGITLIGSSRSGREDFVRTVNFLKENPDVVEYLGTLVGEVQEVKTISDILSAFEKDLTSSWGKTVMEWKI

SEQ ID NO: 38 - protein, 341 aa, Lactobacillus plantarum
  source 1..341: note = Lactobacillus plantarum EGD-AQ4
MLNQVYRLVDPRQIEVQTVAEEITDNDIVVRPKYLSVCHADTRYFTGQRPQATLRQKLPMALIHEGVGEVVKDPQNKFKPGTLVAMVPNTPFETDPIIKENYLPTSKFRSSGYDGFMQEYVTLHRDRAIVVPDNFDHQMSAFIEMVSVGVHALTQLEAVMDADRKIIGIWGDGNLGFITATLVKQIFPDSQLMIFGRHRSKLDYFSFADKTYLVDDIPSDLQVSQALECTGGRGSESAIAQIIQHIRPMGTAILMGVSEDPVGIDTRSVLAEGLTLRGVSRSGRADFQRAIDILTKSPVTRERLQNLVGFTRKVSTIQDITDFFEGALTNYWGKAVMEWDV

SEQ ID NO: 39 - protein, 337 aa, Ruminococcus sp.
  source 1..337: note = uncultured Ruminococcus sp.
MINYVYQLVSPHVFSLKYEEVDFKKEVIIRPKCMAVCHADQRYFLGRRDAKILRQKLPMALIHECCGQVVWDGTGSFQRGQKVVLIPNVPGRDDGVTYENYAEGSRFLSSGCDGFMREYVNLSPDRVVPFEQVPLPVAAITEFVSVAVHAAGRFMRAAHTRREAIGVWGDGSLAYVVCCVLRRLLPESRIFVVGKHERKLLQFSFADRTFLFDSLPEDFHIDHAFECTGGEGSYYAIDDIITAVRPQGAVMLMGVSENRVPVRTRDILEKGLTFTGCSRSGREDFVKAVELMEQPQFQKRLSAIIYEDRPVHTVADLSRVFETDLNTPFKTVFRWEI

SEQ ID NO: 40 - protein, 338 aa, Kandleria vitulina
MINTVYRLIAPKSIRADFVDLKLDEERIIIRPTYLSICAADQRYYTGSRGRVVMKQKLPMALIHEAVGEVVYDPKGELPVGTHVVMIPNTPNEKDDIIKENYLRSSQFRASGFDGFMQNVVSMRRDLVIPFDYEPEVGVLLELMSVGMNAVSTFKKHAHDRKDAIGIWGNGNVGFVTALILRKEFPDAKIYVFGVEEHKNRYFSFADDTFIINDIPEDLQLDHAFECVGGRGSEAAISQIIDYIKPQGTINLMGVSENPVPINTRMVLEKGLQLLGNSRSNYDDFKKSVDMMANNKDVREYLSTIVSEMVVVNTIDDMIRAFEDDTYNDFKTVMKWEI

SEQ ID NO: 41 - protein, 341 aa, Lactiplantibacillus plantarum
MLNQVYRLVSPRQFEVETVAEEVDADDLIVRPKFLSICHADTRYFFGQRSQAALRAKLPMALIHEAVGEVVYDPRNEYKPGTLVAMVPNTPVKKDSIIQENYLPSSRFRSSGYDGFMQEYVCLRRDRAITVPSDFDPHMAAFIEMVSVGVQALTKLESTMDEDQRVIGIWGDGNLGYITATLVKQIFPDSQLLVFGRHQSKLDYFSFADKTYLVDDIPADVKVSQALECTGGQGSEAAIQQIIQHIQPMGTAILMGVSENPVGIDTRSVLAEGLTLRGVSRSSREDFKRAVDILSSSPVTRERLQNLVGYVQKVSSIQDITNFFDSALTNYWGKEVMEWDV

SEQ ID NO: 42 - protein, 342 aa, unidentified
  source 1..342: note = Lachnospiraceae bacterium
MINTLYKLTAPLIVESFYENIDCHSDNIIVRPEKLSICKADIRYYFGMRNAKVLKEKLPLALIHEACGSVVYDITGKFKAGDQVVMLPNIPGINMQYHENYRRDSLFRSSGADGFMQELVSIPQSQVIKFEKMDQNIAAFTEFISVAIHAVSSYLDRSAGKRNGIKRKIGVWGSGAMGYAVSCVLKYFIPSAEITVIGGSKAKLDMFSFVNHTCSLSELPDDAEFDDCFECVGGAQSGNAINQIIDHILPEGLLLLLGVSEEAVPVNTRMVLEKGITLLGRSRSERSDFIKTIDILDTNENIRRRISNLISGEVEINEVNDIHKAFNQSKIADYKIILNWRI

SEQ ID NO: 43 - DNA, 1599 bp, synthetic construct
  source 1..1599: mol_type = other DNA
cttaaacacggcaagggtagcgttgcaaacgacgtaaccgacgaaatggtccgtctgaattggctaactgagttcatgccactccccaccatcaagcacttcatccgtacacctgacgatgcgtggctgttgactacggccatccccggtaagaccgcttttcaggtcctcgaggaataccctgactcgggcgagaacatcgtggatgccttggctgtgtttttgcgccgccttcactctattccggtctgcaactgccctttcaacagcgaccgtgtttttaggcttgcccaggcacaatcacgcatgaacaatggtctagtcgacgctagtgatttcgatgacgagcgcaacggctggccggtggaacaagtgtggaaagagatgcataagctcctgcccttttccccagactctgtcgtgacgcatggtgatttctcgcttgacaacctcatctttgacgagggcaagctcattggctgcattgacgtcggccgggttggcatcgccgatcgctaccaagatcttgcgatcctctggaattgtctgggcgagttctcccctagcctccagaagcgtctgttccagaaatatgggatcgataacccagacatgaacaagctccagttccatttgatgctggatgaatttttctaatggtgttcaccactgttgcttcccctttgttggagcgtccgtcgttctgatggcgctctgagcccaaaatatcccttcttcgcccgagagcaagcctcggagtgtgcttgcaatctacttttcctactaaagttatcttcttgtggcttctgaatttgaatagaacgtgttcagacttgttagctaaatttgttgatgcgagatacttgacagaatcccgttgatgaactcatctgtgtgaccaccgcctggtgatggaatctcgcgcggaagccgtggtgttactgactctcaagcaattcagtagataaatttgtataacatcattgcaaggggtgctagcaatcaattgtccaataccaaacggcggcaagtgcaaaggggcgatagagagtttctgcgaggaagggaaggaatccgtatgcctgaaaacttttgtacaagtgtctttgtaagggcgaggtctgctctgacatctctctgagatctgagatctgatacctgcaggataacttcgtataatgtatgctatacgaagttataaccagatcgaagctcaccccttgttgcaacaagacgagttggttgctcaccataagagcaagaacattgtcatcactgcttacagtcccttgggcaacaatgtcgctggtaaaccacctctgactgagaaccccggtattgtggatgctgctaagcgtttgaaccatactcctgctgctgtgctcattgcttggggtattcaacgcgggtacagcgtcttggtcaagtcagttacaccctcacggatcaagagtaactttgaacagatcactctgtctgatgaggaattccaacgggttaccaacctcatcaaggagtacggtgagagccgtaacaacgttcctttcaattacaagccttcgtggtccattgacgtctttggtacccaggacgaggcta

SEQ ID NO: 44 - DNA, 4618 bp, synthetic construct
  source 1..4618: mol_type = other DNA
tgcagagccttgcaaatgatgaaagaccaatggaattgatcattgattattgatgatgcatgatgaaagagatagaaacagatgcaagatgggatggcgcgatgatcaaatgataatgaacgttcaacccttcaaaattgaaactctcaggctgagcggctgagcaagctctgagaatgtgggtcttcgaagactttcgcttgagcatggtgcatgtgcaaagagatggaatgtggaattgttgtaggtaggaacacagcccggtagagcggcgcagtggctcagcgaagctgggagaacgactgaaccggtcttgagattcatcatctcagcgtgcgtcagcgcgtcagcttcagcgtttgagaatggcacggactgacctgtcgtacatcccaaggaggcccgtgcgctatactcgccttgtggcctaatctgcgatcaacccatcctcaacgaaagcgcaagtagcgactaagcacactatctttcgggtcggtgcggtcacagtatcggcatctctgtctttagctacgatggtgtgcgtgtaactgatcagtacacccgctgtatcaaaactctatcttcaatccgctaagaatcgtcaccatcagtacatcagtacatcagtgggctaagatctaatggtgtcgttcgacggccgcgggcactagccacgagccaagagcggtacagttgctgcgaaatggtgggcagcctgacaggttcagtttgaataggatgaaaacgccatgaagaacagagaagctggcaattgacgatagtggggcgagcgcacgctgcttgctggtccgagcgtaggacgaacgacaaaccatgggcggggccaccaggccccagggagggcgtcactggttggatgtcgtctgttaggctagagctcaggcgctcagggcctctggcccaagcctcggacgcaagcctctgacgagcgagcgcgcgctggggcgggtctgcgcaggaacggcaggactgccgagttggttgaatattgaatggttggatgattggtttgctgggtttggttttgacacgcacggcacaggacaagtgagtttggaggttggatttgcgcaggtagaaagggcgctcggcctcagggcctcagcgtcagcagacgagctcgccagtccaggtcagtacccagtgttcgttacttcccaccgtccagagtttgctgctgcctctcagcttgattcgtgtcggagaagtagaaatggtcacagcgtaccacacactgtccccatgcctgcgtcctgctccacgagtgtttagccacaaaaatttatggacaaccttactgagcctgtgctggggggtgctttagcaccagcactggcgccatggcgtcaaggttaattccactgtcattcgacaaccttcaactgatgggggcaactgggcacaaaaccttggatatataaccaactccaactcccacggttttttaccttttgctcttctccccaggactcactacttctactcctctattcatcttcaccaaaatgtgagacctaatatcactgctgtacagacaagactgtgtatattaggtctcaatgaaagccctcgttttggacgaatacaatcaattgaattaccgtgatttccccgagcccgaaatccactccggagaggtgctgatcgagatcaaggcgtgcggtatttgtggctctgatgtgcacggtatggacggatcgaccggacgtcgaaaaccaccgctggttatgggtcacgaagcctctggcgtcattatcgaaaccggtagcgatgttaagaactggaaaacaggtgaccgagtcacgtttgatagcaccgtgtacccacttaatgactggttcactctgaaaggccactacaacctcagcaacaatcgacaagtgttgggagtgtctcctggcgagtatcgccgtcatggtgcgtttgccgaacgacttgcggttccgcaacatatcctgcaccgaatcccagagaacgttagcttcgtggaggctgcgatggttgagcccatcgctgtggcagctcacgcggtgaatgtttctggattgaagccgggcaattcggctatggttgcgggcgcgggcatggtcggagtgtttgttgtccaactgctgaagctttttggagctaaccctgttgtggttattgacatcgatcacaagaaactgaagcttgctcacgaattcggtgctgactttacattcaatcctaaagaaaaggatattgacgaacgaatcttgcaactcacaaaatcgcgcggttttgaccttacatttgaagtcgtcggcatcaccgagacggtccagacctgcattaccaacacacgtaagggtggcacggtggttcttgttggaaacttgtcccccgaaatccaatttcccctgcaaaaagtcgttacttctgaaatcactgtgcagggctcttgtgccatcaagggtgaatacgagctggcactggacctcttggccgcaaagaaggttgacgtctcgaaactcgtttcggctgttgcaccgctgtctgagggagcggaatggtttaagcgactttacgagaaggaaccgggattgaataaagtgatcctcattccagataagtaacacggatcaacaaaaatgtgcgccagctttgttgtgtgcccttttcctctagcggatcctatccacatttcgtgaatgaaccgattaagctctgacgagatttccttgttttctgtagatacctcttgtagaggtgtcaaagttatgttgtgatcgagagagttacctgcaaggtattatgcaagcggcttgatgaggacactcaactacgtgtgagtaggagtgcgttgctcagcagttgacgcgtgagccgcttgagcagcttgataaaggtcctaatcgtcttccagctgttggcagacgacaatgtgctgtagtagtaggataggcccgtaaaagtgtagaagcaataggttgagactgactgtaatgggtacttgcgttcaaagactgaaagtccaaaggattgctcaaaggcccctgaggtctgagcctctgagcgcgctcttcgtcaaaattcgccggggccatcggtcatcctctcgagggcagcatcttcctgcttgaagactgagtccgtctcagataacttcgtataatgtatgctatacgaagttatcctgcaggagctcagaccttgcatgttagccttgaccttgcctctatgaccactaattcgcacaagattgcacgttaccattgtcatcttgccatgtatccaatgtttcctgtttgccatagtacgtagtagatacatcgatcatcgatgcagatgacgcagatggcattggttcgctttgccctatgcatgcatcatgcatcatgcatcatgcgtcatgcgtcactatccatattaatcattgccctctgtactaggccatgacacctgcagacccttccccagggatgcttcttgtaatagccaatatactacacaactttaccgattacgatcgagatcgatctcactatagtttgtcgaacttcgatgcacatcgagggtgcggaaaaaagctgacggaagcggaagtgggtgaattggttaatttagttagattggcagggttgttcccaagattcaacgcaagctgagaaagaaaacagaaacacgaggcataaggccagtcagaaaatgcattacgaggggagttgaagtgactgtgggccagtgcctgggtcgtcatgtgcaaattttttcttcggttagactgccgcagcatgcagcaactctgccggccctatataactagtgcttcatcttcttgtcattcttgtctctttaccaacacaccggtactctttcaccatgggtaaggaaaagacacacgtatcgcgaccccgactcaactccaacatggacgcagacctgtacggatacaaatgggctcgagataatgtcggacagtcgggtgcgacgatctacagactctatggaaaaccggacgcccccgagctctttcttaaacacggcaagggtagcgttgcaaacgacgtaaccgacgaaatggtccgtctgaattggctaactgagttcatgccactccccaccatcaagcacttcatccgtacacctgacgatgcgtggctgttgactacggccatccccggtaagaccgcttttcaggtcctcgaggaataccctgactcgggcgagaacatcgtggatgccttggctgtgtttttgcgccgccttcactctattccggtctgcaactgccctttcaacagcgaccgtgtttttaggcttgcccaggcacaatcacgcatgaacaatggtctagtcgacgctagtgatttcgatgacgagcgcaacggctggccggtggaacaagtgtggaaagagatgcataagctcctgcccttttccccagactctgtcgtgacgcatggtgatttctcgcttgacaacctcatctttgacgagggcaagctcattggctgcattgacgtcggccgggttggcatcgccgatcgctaccaagatcttgcgatcctctggaattgtctgggcgagttctcccctagcctccagaagcgtctgttccagaaatatgggatcg

SEQ ID NO: 45 - DNA, 4558 bp, synthetic construct
  source 1..4558: mol_type = other DNA
tgcagagccttgcaaatgatgaaagaccaatggaattgatcattgattattgatgatgcatgatgaaagagatagaaacagatgcaagatgggatggcgcgatgatcaaatgataatgaacgttcaacccttcaaaattgaaactctcaggctgagcggctgagcaagctctgagaatgtgggtcttcgaagactttcgcttgagcatggtgcatgtgcaaagagatggaatgtggaattgttgtaggtaggaacacagcccggtagagcggcgcagtggctcagcgaagctgggagaacgactgaaccggtcttgagattcatcatctcagcgtgcgtcagcgcgtcagcttcagcgtttgagaatggcacggactgacctgtcgtacatcccaaggaggcccgtgcgctatactcgccttgtggcctaatctgcgatcaacccatcctcaacgaaagcgcaagtagcgactaagcacactatctttcgggtcggtgcggtcacagtatcggcatctctgtctttagctacgatggtgtgcgtgtaactgatcagtacacccgctgtatcaaaactctatcttcaatccgctaagaatcgtcaccatcagtacatcagtacatcagtgggctaagatctaatggtgtcgttcgacggccgcgggcactagccacgagccaagagcggtacagttgctgcgaaatggtgggcagcctgacaggttcagtttgaataggatgaaaacgccatgaagaacagagaagctggcaattgacgatagtggggcgagcgcacgctgcttgctggtccgagcgtaggacgaacgacaaaccatgggcggggccaccaggccccagggagggcgtcactggttggatgtcgtctgttaggctagagctcaggcgctcagggcctctggcccaagcctcggacgcaagcctctgacgagcgagcgcgcgctggggcgggtctgcgcaggaacggcaggactgccgagttggttgaatattgaatggttggatgattggtttgctgggtttggttttgacacgcacggcacaggacaagtgagtttggaggttggatttgcgcaggtagaaagggcgctcggcctcagggcctcagcgtcagcagacgagctcgccagtccaggtcagtacccagtgttcgttacttcccaccgtccagagtttgctgctgcctctcagcttgattcgtgtcggagaagtagaaatggtcacagcgtaccacacactgtccccatgcctgcgtcctgctccacgagtgtttagccacaaaaatttatggacaaccttactgagcctgtgctggggggtgctttagcaccagcactggcgccatggcgtcaaggttaattccactgtcattcgacaaccttcaactgatgggggcaactgggcacaaaaccttggatatataaccaactccaactcccacggttttttaccttttgctcttctccccaggactcactacttctactcctctattcatcttcaccaaaatgtgagacctaatatcactgctgtacagacaagactgtgtatattaggtctcaatgaaagctatggtgtggcttggacccgaacgaatggaagtgcgagatcttcctgcgccgcgaccgggtgcaggtgaagtgctggttcagacggaagctgctggaatttgtggctctgaagtggaggcctatttgggtcgcatggctaatcgaacaccgccgttggtgatgggtcacgaatatgctggacttgtcaccgaggtcggagagggagtcgaccgcgtctggtcccgtcgacgcgttgcggttaacccgattgttggttgcggtcgttgtcgaaactgcgccgccggtgatcgaaacttgtgtcctgatcgtcaccttcttggcattgcagcgccaggaggattcgcagcgttctcggtggttcccgaacgatgcctcttttctctgcctgaaggaatggatgcgcgactgggcgcgctcaccaagccattggccaacggtgtgcatcttattcgcaaaagcggcgcgggacgaggccgagttgtggttatcggcgcgggaactattggactcggatgtttgcaagctgctttgttgcacggtgctgagcaagttgacgtcgttgaacgccatccgggacgacgccgtcacgcacttgccctgggagcacgccaggcggtggcggaattggcagatgtcgaacctggtgctgatcttgtggttgatgccgcaggatccgaagcgacacgccgcgcggccgtggaattggttggcccggcgggaacggcctcttttgttggactccactccgacgaaactgtcctgccttggcatcgcattatccgagccaatattcgagttcaaggaacatttggctacgcagatcgtgatttccagcaagctcttgactggttggcagcgggaaaggcagccattccattgtctgaactccgccccttggacgatggcccagcggccttcgagcgccttgctcgtggaccgatcgacgaaatcaaagtctttttggcttaacacggatcaacaaaaatgtgcgccagctttgttgtgtgcccttttcctctagcggatcctatccacatttcgtgaatgaaccgattaagctctgacgagatttccttgttttctgtagatacctcttgtagaggtgtcaaagttatgttgtgatcgagagagttacctgcaaggtattatgcaagcggcttgatgaggacactcaactacgtgtgagtaggagtgcgttgctcagcagttgacgcgtgagccgcttgagcagcttgataaaggtcctaatcgtcttccagctgttggcagacgacaatgtgctgtagtagtaggataggcccgtaaaagtgtagaagcaataggttgagactgactgtaatgggtacttgcgttcaaagactgaaagtccaaaggattgctcaaaggcccctgaggtctgagcctctgagcgcgctcttcgtcaaaattcgccggggccatcggtcatcctctcgagggcagcatcttcctgcttgaagactgagtccgtctcagataacttcgtataatgtatgctatacgaagttatcctgcaggagctcagaccttgcatgttagccttgaccttgcctctatgaccactaattcgcacaagattgcacgttaccattgtcatcttgccatgtatccaatgtttcctgtttgccatagtacgtagtagatacatcgatcatcgatgcagatgacgcagatggcattggttcgctttgccctatgcatgcatcatgcatcatgcatcatgcgtcatgcgtcactatccatattaatcattgccctctgtactaggccatgacacctgcagacccttccccagggatgcttcttgtaatagccaatatactacacaactttaccgattacgatcgagatcgatctcactatagtttgtcgaacttcgatgcacatcgagggtgcggaaaaaagctgacggaagcggaagtgggtgaattggttaatttagttagattggcagggttgttcccaagattcaacgcaagctgagaaagaaaacagaaacacgaggcataaggccagtcagaaaatgcattacgaggggagttgaagtgactgtgggccagtgcctgggtcgtcatgtgcaaattttttcttcggttagactgccgcagcatgcagcaactctgccggccctatataactagtgcttcatcttcttgtcattcttgtctctttaccaacacaccggtactctttcaccatgggtaaggaaaagacacacgtatcgcgaccccgactcaactccaacatggacgcagacctgtacggatacaaatgggctcgagataatgtcggacagtcgggtgcgacgatctacagactctatggaaaaccggacgcccccgagctctttcttaaacacggcaagggtagcgttgcaaacgacgtaaccgacgaaatggtccgtctgaattggctaactgagttcatgccactccccaccatcaagcacttcatccgtacacctgacgatgcgtggctgttgactacggccatccccggtaagaccgcttttcaggtcctcgaggaataccctgactcgggcgagaacatcgtggatgccttggctgtgtttttgcgccgccttcactctattccggtctgcaactgccctttcaacagcgaccgtgtttttaggcttgcccaggcacaatcacgcatgaacaatggtctagtcgacgctagtgatttcgatgacgagcgcaacggctggccggtggaacaagtgtggaaagagatgcataagctcctgcccttttccccagactctgtcgtgacgcatggtgatttctcgcttgacaacctcatctttgacgagggcaagctcattggctgcattgacgtcggccgggttggcatcgccgatcgctaccaagatcttgcgatcctctggaattgtctgggcgagttctcccctagcctccagaagcgtctgttccagaaatatgggatcg

SEQ ID NO: 46 - DNA, 4594 bp, synthetic construct
  source 1..4594: mol_type = other DNA
tgcagagccttgcaaatgatgaaagaccaatggaattgatcattgattattgatgatgcatgatgaaagagatagaaacagatgcaagatgggatggcgcgatgatcaaatgataatgaacgttcaacccttcaaaattgaaactctcaggctgagcggctgagcaagctctgagaatgtgggtcttcgaagactttcgcttgagcatggtgcatgtgcaaagagatggaatgtggaattgttgtaggtaggaacacagcccggtagagcggcgcagtggctcagcgaagctgggagaacgactgaaccggtcttgagattcatcatctcagcgtgcgtcagcgcgtcagcttcagcgtttgagaatggcacggactgacctgtcgtacatcccaaggaggcccgtgcgctatactcgccttgtggcctaatctgcgatcaacccatcctcaacgaaagcgcaagtagcgactaagcacactatctttcgggtcggtgcggtcacagtatcggcatctctgtctttagctacgatggtgtgcgtgtaactgatcagtacacccgctgtatcaaaactctatcttcaatccgctaagaatcgtcaccatcagtacatcagtacatcagtgggctaagatctaatggtgtcgttcgacggccgcgggcactagccacgagccaagagcggtacagttgctgcgaaatggtgggcagcctgacaggttcagtttgaataggatgaaaacgccatgaagaacagagaagctggcaattgacgatagtggggcgagcgcacgctgcttgctggtccgagcgtaggacgaacgacaaaccatgggcggggccaccaggccccagggagggcgtcactggttggatgtcgtctgttaggctagagctcaggcgctcagggcctctggcccaagcctcggacgcaagcctctgacgagcgagcgcgcgctggggcgggtctgcgcaggaacggcaggactgccgagttggttgaatattgaatggttggatgattggtttgctgggtttggttttgacacgcacggcacaggacaagtgagtttggaggttggatttgcgcaggtagaaagggcgctcggcctcagggcctcagcgtcagcagacgagctcgccagtccaggtcagtacccagtgttcgttacttcccaccgtccagagtttgctgctgcctctcagcttgattcgtgtcggagaagtagaaatggtcacagcgtaccacacactgtccccatgcctgcgtcctgctccacgagtgtttagccacaaaaatttatggacaaccttactgagcctgtgctggggggtgctttagcaccagcactggcgccatggcgtcaaggttaattccactgtcattcgacaaccttcaactgatgggggcaactgggcacaaaaccttggatatataaccaactccaactcccacggttttttaccttttgctcttctccccaggactcactacttctactcctctattcatcttcaccaaaatgtgagacctaatatcactgctgtacagacaagactgtgtatattaggtctcaatgaagtcgttgatttactatggcccgcacgatctgcgatatggagattctcctaagccaaagatccgatctggagaagtcctcctccgaatcaaaagcgtcggtatctgcggcactgacctccacatctataacggaggcatgaaaaatctgccgttgcctctgattatgggtcacgagttcagcggagttattgaagagcttgcccgagacgtgaagaactttaaggttggagatcgagtgatcgctgaacacgttatcaattgtggaaaatgttcgtattgtcttagcggcaagccgaatctgtgtgctaactctcgcattattggagttcaccgccccggagcgctcgccgaatacttggctgttcccgcggacctggtgtacaagatcccggcgaaactgtcttttgaagagggcgcaatgatcgaacccctttctatcgcctattatgccgtgaagcaagctcgtagcatcctgggtaaaaaggtggcggtcatcggccaaggacccatcggcctgctgcttgaccaaatcctccgcgacgcaggcgctgaagtcattggcattgacatcgcagattggcgattgaaactcgcgaagaaaaagaagtgggcagatcatacaatcaactccagccagaaaacctggctcaagaagatccagaagatcgcaccagaaggcgtggacacagtgtttgaggttgttggccgtgaggaaactgccgagatggctattgaaatcgcgcgtcgagatggtgacgtttttatcctcggtgtctttgaaagcgccgcatctttgaacatgatgaatattgttaagaaggaactcaacgtgttcggaagctggacctgtgcgttttctttccccccttcgattgctctcgccgttgccaagaaagttgatttgaaatccttgatcacgaatcgatatgacgtgaaggacggtgccctggcatttaaggagtctgcctcttataaaggtaagcgaatcaagactgttatcaacttttaacacggatcaacaaaaatgtgcgccagctttgttgtgtgcccttttcctctagcggatcctatccacatttcgtgaatgaaccgattaagctctgacgagatttccttgttttctgtagatacctcttgtagaggtgtcaaagttatgttgtgatcgagagagttacctgcaaggtattatgcaagcggcttgatgaggacactcaactacgtgtgagtaggagtgcgttgctcagcagttgacgcgtgagccgcttgagcagcttgataaaggtcctaatcgtcttccagctgttggcagacgacaatgtgctgtagtagtaggataggcccgtaaaagtgtagaagcaataggttgagactgactgtaatgggtacttgcgttcaaagactgaaagtccaaaggattgctcaaaggcccctgaggtctgagcctctgagcgcgctcttcgtcaaaattcgccggggccatcggtcatcctctcgagggcagcatcttcctgcttgaagactgagtccgtctcagataacttcgtataatgtatgctatacgaagttatcctgcaggagctcagaccttgcatgttagccttgaccttgcctctatgaccactaattcgcacaagattgcacgttaccattgtcatcttgccatgtatccaatgtttcctgtttgccatagtacgtagtagatacatcgatcatcgatgcagatgacgcagatggcattggttcgctttgccctatgcatgcatcatgcatcatgcatcatgcgtcatgcgtcactatccatattaatcattgccctctgtactaggccatgacacctgcagacccttccccagggatgcttcttgtaatagccaatatactacacaactttaccgattacgatcgagatcgatctcactatagtttgtcgaacttcgatgcacatcgagggtgcggaaaaaagctgacggaagcggaagtgggtgaattggttaatttagttagattggcagggttgttcccaagattcaacgcaagctgagaaagaaaacagaaacacgaggcataaggccagtcagaaaatgcattacgaggggagttgaagtgactgtgggccagtgcctgggtcgtcatgtgcaaattttttcttcggttagactgccgcagcatgcagcaactctgccggccctatataactagtgcttcatcttcttgtcattcttgtctctttaccaacacaccggtactctttcaccatgggtaaggaaaagacacacgtatcgcgaccccgactcaactccaacatggacgcagacctgtacggatacaaatgggctcgagataatgtcggacagtcgggtgcgacgatctacagactctatggaaaaccggacgcccccgagctctttcttaaacacggcaagggtagcgttgcaaacgacgtaaccgacgaaatggtccgtctgaattggctaactgagttcatgccactccccaccatcaagcacttcatccgtacacctgacgatgcgtggctgttgactacggccatccccggtaagaccgcttttcaggtcctcgaggaataccctgactcgggcgagaacatcgtggatgccttggctgtgtttttgcgccgccttcactctattccggtctgcaactgccctttcaacagcgaccgtgtttttaggcttgcccaggcacaatcacgcatgaacaatggtctagtcgacgctagtgatttcgatgacgagcgcaacggctggccggtggaacaagtgtggaaagagatgcataagctcctgcccttttccccagactctgtcgtgacgcatggtgatttctcgcttgacaacctcatctttgacgagggcaagctcattggctgcattgacgtcggccgggttggcatcgccgatcgctaccaagatcttgcgatcctctggaattgtctgggcgagttctcccctagcctccagaagcgtctgttccagaaatatgggatcg

SEQ ID NO: 47 - DNA, 4624 bp, synthetic construct
  source 1..4624: mol_type = other DNA
tgcagagccttgcaaatgatgaaagaccaatggaattgatcattgattattgatgatgcatgatgaaagagatagaaacagatgcaagatgggatggcgcgatgatcaaatgataatgaacgttcaacccttcaaaattgaaactctcaggctgagcggctgagcaagctctgagaatgtgggtcttcgaagactttcgcttgagcatggtgcatgtgcaaagagatggaatgtggaattgttgtaggtaggaacacagcccggtagagcggcgcagtggctcagcgaagctgggagaacgactgaaccggtcttgagattcatcatctcagcgtgcgtcagcgcgtcagcttcagcgtttgagaatggcacggactgacctgtcgtacatcccaaggaggcccgtgcgctatactcgccttgtggcctaatctgcgatcaacccatcctcaacgaaagcgcaagtagcgactaagcacactatctttcgggtcggtgcggtcacagtatcggcatctctgtctttagctacgatggtgtgcgtgtaactgatcagtacacccgctgtatcaaaactctatcttcaatccgctaagaatcgtcaccatcagtacatcagtacatcagtgggctaagatctaatggtgtcgttcgacggccgcgggcactagccacgagccaagagcggtacagttgctgcgaaatggtgggcagcctgacaggttcagtttgaataggatgaaaacgccatgaagaacagagaagctggcaattgacgatagtggggcgagcgcacgctgcttgctggtccgagcgtaggacgaacgacaaaccatgggcggggccaccaggccccagggagggcgtcactggttggatgtcgtctgttaggctagagctcaggcgctcagggcctctggcccaagcctcggacgcaagcctctgacgagcgagcgcgcgctggggcgggtctgcgcaggaacggcaggactgccgagttggttgaatattgaatggttggatgattggtttgctgggtttggttttgacacgcacggcacaggacaagtgagtttggaggttggatttgcgcaggtagaaagggcgctcggcctcagggcctcagcgtcagcagacgagctcgccagtccaggtcagtacccagtgttcgttacttcccaccgtccagagtttgctgctgcctctcagcttgattcgtgtcggagaagtagaaatggtcacagcgtaccacacactgtccccatgcctgcgtcctgctccacgagtgtttagccacaaaaatttatggacaaccttactgagcctgtgctggggggtgctttagcaccagcactggcgccatggcgtcaaggttaattccactgtcattcgacaaccttcaactgatgggggcaactgggcacaaaaccttggatatataaccaactccaactcccacggttttttaccttttgctcttctccccaggactcactacttctactcctctattcatcttcaccaaaatgtgagacctaatatcactgctgtacagacaagactgtgtatattaggtctcaatgaaggcaatgttgcttagccagtatcgacgactggaaattgccgagttgccgacaccgatccctggtcgtggcgaactcttgatccatgtcgcggcatgtggtatttgcggaagcgatgtgcacggatacgatggcagcagcggacgacgtatccctccaatcgtgatgggccatgaggctgcaggacgtgttgcggcactcggtccgcaggtcacgggctggtcggaaggtgatcgcgtcacattcgatagcaccatctcctgcggcacttgcccttactgctcccgcggcgagattaacctctgcgaccgtcgtcaagtgcttggagtttcgtgcggtgactatcgttgcgctggagcttttgcggagtatgttattgtgccgcaacgcattgcttataaattgccggatgccttgagcttctcggaggccgcaactttggaagcggtcgcggttgctgtgcacgctgttagcctttcccaggtttcgccaggtactcaggcactggttattggcgctggtatgattggcctcctcaccttgcaagcgctgcgcgcagccggttgcagctccgtggtgatcgcggacgttgatgcgtcccgtctgcgtttggctaaagaggttggcgcaaccgaaacgcttaatgcgacaggagatgaatttgttgccgaaatcttcaaacgcacaaacggagcgggcacagaccttgccgtcgaagctgtcggtatcgatgctaccgtccgaacggccattaactctgtccgaaaaggcggtacagttaccctggtcggcaatatcacgccggaggtcactcttccgcttcagaaggtggtgacacgccagattcgaatccaaggttcttgcgcatccgctggtgaatacccccgagctatccagctccttacgtctggcgctattaaagtcaaacctctcattaccgctgtggccccgcttgaagacggtcctcagtggtttgagcgcctttacagccgcgagcctaatcttatgaaggtggtccttaccccgggcagcgtgtcttaacacggatcaacaaaaatgtgcgccagctttgttgtgtgcccttttcctctagcggatcctatccacatttcgtgaatgaaccgattaagctctgacgagatttccttgttttctgtagatacctcttgtagaggtgtcaaagttatgttgtgatcgagagagttacctgcaaggtattatgcaagcggcttgatgaggacactcaactacgtgtgagtaggagtgcgttgctcagcagttgacgcgtgagccgcttgagcagcttgataaaggtcctaatcgtcttccagctgttggcagacgacaatgtgctgtagtagtaggataggcccgtaaaagtgtagaagcaataggttgagactgactgtaatgggtacttgcgttcaaagactgaaagtccaaaggattgctcaaaggcccctgaggtctgagcctctgagcgcgctcttcgtcaaaattcgccggggccatcggtcatcctctcgagggcagcatcttcctgcttgaagactgagtccgtctcagataacttcgtataatgtatgctatacgaagttatcctgcaggagctcagaccttgcatgttagccttgaccttgcctctatgaccactaattcgcacaagattgcacgttaccattgtcatcttgccatgtatccaatgtttcctgtttgccatagtacgtagtagatacatcgatcatcgatgcagatgacgcagatggcattggttcgctttgccctatgcatgcatcatgcatcatgcatcatgcgtcatgcgtcactatccatattaatcattgccctctgtactaggccatgacacctgcagacccttccccagggatgcttcttgtaatagccaatatactacacaactttaccgattacgatcgagatcgatctcactatagtttgtcgaacttcgatgcacatcgagggtgcggaaaaaagctgacggaagcggaagtgggtgaattggttaatttagttagattggcagggttgttcccaagattcaacgcaagctgagaaagaaaacagaaacacgaggcataaggccagtcagaaaatgcattacgaggggagttgaagtgactgtgggccagtgcctgggtcgtcatgtgcaaattttttcttcggttagactgccgcagcatgcagcaactctgccggccctatataactagtgcttcatcttcttgtcattcttgtctctttaccaacacaccggtactctttcaccatgggtaaggaaaagacacacgtatcgcgaccccgactcaactccaacatggacgcagacctgtacggatacaaatgggctcgagataatgtcggacagtcgggtgcgacgatctacagactctatggaaaaccggacgcccccgagctctttcttaaacacggcaagggtagcgttgcaaacgacgtaaccgacgaaatggtccgtctgaattggctaactgagttcatgccactccccaccatcaagcacttcatccgtacacctgacgatgcgtggctgttgactacggccatccccggtaagaccgcttttcaggtcctcgaggaataccctgactcgggcgagaacatcgtggatgccttggctgtgtttttgcgccgccttcactctattccggtctgcaactgccctttcaacagcgaccgtgtttttaggcttgcccaggcacaatcacgcatgaacaatggtctagtcgacgctagtgatttcgatgacgagcgcaacggctggccggtggaacaagtgtggaaagagatgcataagctcctgcccttttccccagactctgtcgtgacgcatggtgatttctcgcttgacaacctcatctttgacgagggcaagctcattggctgcattgacgtcggccgggttggcatcgccgatcgctaccaagatcttgcgatcctctggaattgtctgggcgagttctcccctagcctccagaagcgtctgttccagaaatatgggatcg

SEQ ID NO: 48 - DNA, 4615 bp, synthetic construct
  source 1..4615: mol_type = other DNA
tgcagagccttgcaaatgatgaaagaccaatggaattgatcattgattattgatgatgcatgatgaaagagatagaaacagatgcaagatgggatggcgcgatgatcaaatgataatgaacgttcaacccttcaaaattgaaactctcaggctgagcggctgagcaagctctgagaatgtgggtcttcgaagactttcgcttgagcatggtgcatgtgcaaagagatggaatgtggaattgttgtaggtaggaacacagcccggtagagcggcgcagtggctcagcgaagctgggagaacgactgaaccggtcttgagattcatcatctcagcgtgcgtcagcgcgtcagcttcagcgtttgagaatggcacggactgacctgtcgtacatcccaaggaggcccgtgcgctatactcgccttgtggcctaatctgcgatcaacccatcctcaacgaaagcgcaagtagcgactaagcacactatctttcgggtcggtgcggtcacagtatcggcatctctgtctttagctacgatggtgtgcgtgtaactgatcagtacacccgctgtatcaaaactctatcttcaatccgctaagaatcgtcaccatcagtacatcagtacatcagtgggctaagatctaatggtgtcgttcgacggccgcgggcactagccacgagccaagagcggtacagttgctgcgaaatggtgggcagcctgacaggttcagtttgaataggatgaaaacgccatgaagaacagagaagctggcaattgacgatagtggggcgagcgcacgctgcttgctggtccgagcgtaggacgaacgacaaaccatgggcggggccaccaggccccagggagggcgtcactggttggatgtcgtctgttaggctagagctcaggcgctcagggcctctggcccaagcctcggacgcaagcctctgacgagcgagcgcgcgctggggcgggtctgcgcaggaacggcaggactgccgagttggttgaatattgaatggttggatgattggtttgctgggtttggttttgacacgcacggcacaggacaagtgagtttggaggttggatttgcgcaggtagaaagggcgctcggcctcagggcctcagcgtcagcagacgagctcgccagtccaggtcagtacccagtgttcgttacttcccaccgtccagagtttgctgctgcctctcagcttgattcgtgtcggagaagtagaaatggtcacagcgtaccacacactgtccccatgcctgcgtcctgctccacgagtgtttagccacaaaaatttatggacaaccttactgagcctgtgctggggggtgctttagcaccagcactggcgccatggcgtcaaggttaattccactgtcattcgacaaccttcaactgatgggggcaactgggcacaaaaccttggatatataaccaactccaactcccacggttttttaccttttgctcttctccccaggactcactacttctactcctctattcatcttcaccaaaatgtgagacctaatatcactgctgtacagacaagactgtgtatattaggtctcaatgaaagcgatggtgttgaaagaatataagtatctggaaatcgaagacattcctattccgcacatcgaagcagcggacgaactgttggtccgcgtgaaggctaccgccatctgcggttcggatatccatggttttgatggttccaccggacgccgtaaaccgccattggtcatgggacacgaggcatcgggtgttgtcgaaagcgtcggaagcgaagttaaatcgctgaaaatcggtgaccgtgtcaccttcgactccacagtttggtgcggcgaatgctacttttgccgacagggtcaggttaacctgtgcgacaaacgacgtgtgcttggtgtgtcgtgcgacgaataccgcaaggacggtacctttgcggaatatgtcattgtgcccgagcgtattgtgtataagttgccggataatgttgccttcgaagaagcagcattgactgagccggtttctgtcgcgatgcacgcatttgatatcaccggaatgaagccaggagaaaatgcggccgttatcggtagcggtcttatcggactcctcctgattcaaattatccgtgcttattcgccccacttgatcatcgcgttcgatacagacgaaaaacgccgaaaagcagctatcgaagctggagccgatattgcattggacccccaagatcctgagtcgcataaaactgtcctgagcatgactaataaccgaggtgtcgaccgagcatttgaggctgtgggcgcctcggcagcgatcggtacagctattgaatccgtccgaaaaggctcgtccgtcactctgatcggcaatattagcaataaagctgagatcccgctccaatctgtggttacgcgccaaattgcccttttgggttcgtgcgctatttctggagagtatcctgtctctttggctttgatggcgaatcgcactattgacgtgcgtcaagttatctccgcaatcgcccctttggaggagggtcctctgtggttcgaacgcttgtataaacgcgaacctggtcttttgaaggttgttctcacgccgtaacacggatcaacaaaaatgtgcgccagctttgttgtgtgcccttttcctctagcggatcctatccacatttcgtgaatgaaccgattaagctctgacgagatttccttgttttctgtagatacctcttgtagaggtgtcaaagttatgttgtgatcgagagagttacctgcaaggtattatgcaagcggcttgatgaggacactcaactacgtgtgagtaggagtgcgttgctcagcagttgacgcgtgagccgcttgagcagcttgataaaggtcctaatcgtcttccagctgttggcagacgacaatgtgctgtagtagtaggataggcccgtaaaagtgtagaagcaataggttgagactgactgtaatgggtacttgcgttcaaagactgaaagtccaaaggattgctcaaaggcccctgaggtctgagcctctgagcgcgctcttcgtcaaaattcgccggggccatcggtcatcctctcgagggcagcatcttcctgcttgaagactgagtccgtctcagataacttcgtataatgtatgctatacgaagttatcctgcaggagctcagaccttgcatgttagccttgaccttgcctctatgaccactaattcgcacaagattgcacgttaccattgtcatcttgccatgtatccaatgtttcctgtttgccatagtacgtagtagatacatcgatcatcgatgcagatgacgcagatggcattggttcgctttgccctatgcatgcatcatgcatcatgcatcatgcgtcatgcgtcactatccatattaatcattgccctctgtactaggccatgacacctgcagacccttccccagggatgcttcttgtaatagccaatatactacacaactttaccgattacgatcgagatcgatctcactatagtttgtcgaacttcgatgcacatcgagggtgcggaaaaaagctgacggaagcggaagtgggtgaattggttaatttagttagattggcagggttgttcccaagattcaacgcaagctgagaaagaaaacagaaacacgaggcataaggccagtcagaaaatgcattacgaggggagttgaagtgactgtgggccagtgcctgggtcgtcatgtgcaaattttttcttcggttagactgccgcagcatgcagcaactctgccggccctatataactagtgcttcatcttcttgtcattcttgtctctttaccaacacaccggtactctttcaccatgggtaaggaaaagacacacgtatcgcgaccccgactcaactccaacatggacgcagacctgtacggatacaaatgggctcgagataatgtcggacagtcgggtgcgacgatctacagactctatggaaaaccggacgcccccgagctctttcttaaacacggcaagggtagcgttgcaaacgacgtaaccgacgaaatggtccgtctgaattggctaactgagttcatgccactccccaccatcaagcacttcatccgtacacctgacgatgcgtggctgttgactacggccatccccggtaagaccgcttttcaggtcctcgaggaataccctgactcgggcgagaacatcgtggatgccttggctgtgtttttgcgccgccttcactctattccggtctgcaactgccctttcaacagcgaccgtgtttttaggcttgcccaggcacaatcacgcatgaacaatggtctagtcgacgctagtgatttcgatgacgagcgcaacggctggccggtggaacaagtgtggaaagagatgcataagctcctgcccttttccccagactctgtcgtgacgcatggtgatttctcgcttgacaacctcatctttgacgagggcaagctcattggctgcattgacgtcggccgggttggcatcgccgatcgctaccaagatcttgcgatcctctggaattgtctgggcgagttctcccctagcctccagaagcgtctgttccagaaatatgggatcg

SEQ ID NO: 49 - DNA, 4627 bp, synthetic construct
  source 1..4627: mol_type = other DNA
tgcagagccttgcaaatgatgaaagaccaatggaattgatcattgattattgatgatgcatgatgaaagagatagaaacagatgcaagatgggatggcgcgatgatcaaatgataatgaacgttcaacccttcaaaattgaaactctcaggctgagcggctgagcaagctctgagaatgtgggtcttcgaagactttcgcttgagcatggtgcatgtgcaaagagatggaatgtggaattgttgtaggtaggaacacagcccggtagagcggcgcagtggctcagcgaagctgggagaacgactgaaccggtcttgagattcatcatctcagcgtgcgtcagcgcgtcagcttcagcgtttgagaatggcacggactgacctgtcgtacatcccaaggaggcccgtgcgctatactcgccttgtggcctaatctgcgatcaacccatcctcaacgaaagcgcaagtagcgactaagcacactatctttcgggtcggtgcggtcacagtatcggcatctctgtctttagctacgatggtgtgcgtgtaactgatcagtacacccgctgtatcaaaactctatcttcaatccgctaagaatcgtcaccatcagtacatcagtacatcagtgggctaagatctaatggtgtcgttcgacggccgcgggcactagccacgagccaagagcggtacagttgctgcgaaatggtgggcagcctgacaggttcagtttgaataggatgaaaacgccatgaagaacagagaagctggcaattgacgatagtggggcgagcgcacgctgcttgctggtccgagcgtaggacgaacgacaaaccatgggcggggccaccaggccccagggagggcgtcactggttggatgtcgtctgttaggctagagctcaggcgctcagggcctctggcccaagcctcggacgcaagcctctgacgagcgagcgcgcgctggggcgggtctgcgcaggaacggcaggactgccgagttggttgaatattgaatggttggatgattggtttgctgggtttggttttgacacgcacggcacaggacaagtgagtttggaggttggatttgcgcaggtagaaagggcgctcggcctcagggcctcagcgtcagcagacgagctcgccagtccaggtcagtacccagtgttcgttacttcccaccgtccagagtttgctgctgcctctcagcttgattcgtgtcggagaagtagaaatggtcacagcgtaccacacactgtccccatgcctgcgtcctgctccacgagtgtttagccacaaaaatttatggacaaccttactgagcctgtgctggggggtgctttagcaccagcactggcgccatggcgtcaaggttaattccactgtcattcgacaaccttcaactgatgggggcaactgggcacaaaaccttggatatataaccaactccaactcccacggttttttaccttttgctcttctccccaggactcactacttctactcctctattcatcttcaccaaaatgtgagacctaatatcactgctgtacagacaagactgtgtatattaggtctcaatgaaggcactccgcctgtacgctccaggtgacttgcgtttggaggaaatcccaattcctttgccacgtcccgatgaggtgttggttcgcgtgcttgcgtgcggtatctgcggttcggatatcccccgtgtttttgaacacggtacgtataaatacccattggtgccgggccatgagttttccggtattgttgaaaaagtcggctccgaaacgggaaaagattgggttggtcgtcacgttgtcgtctatcccctcatcccgtgtcgacaatgctcctcttgctactctggtctttatacccaatgcctcaactacgactacttgggatctcgccgtgacggaggatttgcagagtatgtgactgtccctgtgaataatattatcccggtccctaatggaatctctggagagatctcggcgatcactgagccatgtgcggtcgcccttcatgccgttcgcaaggcccaagcctgcgtgggtgacacggtccttattacgggagctggaaccattggtatcttgatcgccctctgggcgcgagcagcaggtgccgaagtctttatgactgacattgtggtgggaaagttgaaactggctcgttcgttgggttttcagcatctgctggacgccaaacaaacaaatgtttctgaatgggttaagcaaaagtgtaaacacggagttgatatcgtgttcgaaaccacgggacatcccgcgggactcgaaacgtcgattgactcttgttctattacaggcaaaattattctcgtgggcaatcccagcttcgaagagatgaaagttccggctaaacaatatggaatgattctgcgcaaggagatccagattactggaatttggaattcgctcatcaacgaatatccaaaaaacgagtggcaagttgtgctgcaagagttcaagaaggagtcgtccttgtactcgaagattatcacgcataaggttcccattgagggccttaaggaattgtttgtgacgatttacaacaaacaggtctttccggtgaaggctatgtttatcaataaggagatctaacacggatcaacaaaaatgtgcgccagctttgttgtgtgcccttttcctctagcggatcctatccacatttcgtgaatgaaccgattaagctctgacgagatttccttgttttctgtagatacctcttgtagaggtgtcaaagttatgttgtgatcgagagagttacctgcaaggtattatgcaagcggcttgatgaggacactcaactacgtgtgagtaggagtgcgttgctcagcagttgacgcgtgagccgcttgagcagcttgataaaggtcctaatcgtcttccagctgttggcagacgacaatgtgctgtagtagtaggataggcccgtaaaagtgtagaagcaataggttgagactgactgtaatgggtacttgcgttcaaagactgaaagtccaaaggattgctcaaaggcccctgaggtctgagcctctgagcgcgctcttcgtcaaaattcgccggggccatcggtcatcctctcgagggcagcatcttcctgcttgaagactgagtccgtctcagataacttcgtataatgtatgctatacgaagttatcctgcaggagctcagaccttgcatgttagccttgaccttgcctctatgaccactaattcgcacaagattgcacgttaccattgtcatcttgccatgtatccaatgtttcctgtttgccatagtacgtagtagatacatcgatcatcgatgcagatgacgcagatggcattggttcgctttgccctatgcatgcatcatgcatcatgcatcatgcgtcatgcgtcactatccatattaatcattgccctctgtactaggccatgacacctgcagacccttccccagggatgcttcttgtaatagccaatatactacacaactttaccgattacgatcgagatcgatctcactatagtttgtcgaacttcgatgcacatcgagggtgcggaaaaaagctgacggaagcggaagtgggtgaattggttaatttagttagattggcagggttgttcccaagattcaacgcaagctgagaaagaaaacagaaacacgaggcataaggccagtcagaaaatgcattacgaggggagttgaagtgactgtgggccagtgcctgggtcgtcatgtgcaaattttttcttcggttagactgccgcagcatgcagcaactctgccggccctatataactagtgcttcatcttcttgtcattcttgtctctttaccaacacaccggtactctttcaccatgggtaaggaaaagacacacgtatcgcgaccccgactcaactccaacatggacgcagacctgtacggatacaaatgggctcgagataatgtcggacagtcgggtgcgacgatctacagactctatggaaaaccggacgcccccgagctctttcttaaacacggcaagggtagcgttgcaaacgacgtaaccgacgaaatggtccgtctgaattggctaactgagttcatgccactccccaccatcaagcacttcatccgtacacctgacgatgcgtggctgttgactacggccatccccggtaagaccgcttttcaggtcctcgaggaataccctgactcgggcgagaacatcgtggatgccttggctgtgtttttgcgccgccttcactctattccggtctgcaactgccctttcaacagcgaccgtgtttttaggcttgcccaggcacaatcacgcatgaacaatggtctagtcgacgctagtgatttcgatgacgagcgcaacggctggccggtggaacaagtgtggaaagagatgcataagctcctgcccttttccccagactctgtcgtgacgcatggtgatttctcgcttgacaacctcatctttgacgagggcaagctcattggctgcattgacgtcggccgggttggcatcgccgatcgctaccaagatcttgcgatcctctggaattgtctgggcgagttctcccctagcctccagaagcgtctgttccagaaatatgggatcg

SEQ ID NO: 50 - DNA, 4594 bp, synthetic construct
  source 1..4594: mol_type = other DNA
tgcagagccttgcaaatgatgaaagaccaatggaattgatcattgattattgatgatgcatgatgaaagagatagaaacagatgcaagatgggatggcgcgatgatcaaatgataatgaacgttcaacccttcaaaattgaaactctcaggctgagcggctgagcaagctctgagaatgtgggtcttcgaagactttcgcttgagcatggtgcatgtgcaaagagatggaatgtggaattgttgtaggtaggaacacagcccggtagagcggcgcagtggctcagcgaagctgggagaacgactgaaccggtcttgagattcatcatctcagcgtgcgtcagcgcgtcagcttcagcgtttgagaatggcacggactgacctgtcgtacatcccaaggaggcccgtgcgctatactcgccttgtggcctaatctgcgatcaacccatcctcaacgaaagcgcaagtagcgactaagcacactatctttcgggtcggtgcggtcacagtatcggcatctctgtctttagctacgatggtgtgcgtgtaactgatcagtacacccgctgtatcaaaactctatcttcaatccgctaagaatcgtcaccatcagtacatcagtacatcagtgggctaagatctaatggtgtcgttcgacggccgcgggcactagccacgagccaagagcggtacagttgctgcgaaatggtgggcagcctgacaggttcagtttgaataggatgaaaacgccatgaagaacagagaagctggcaattgacgatagtggggcgagcgcacgctgcttgctggtccgagcgtaggacgaacgacaaaccatgggcggggccaccaggccccagggagggcgtcactggttggatgtcgtctgttaggctagagctcaggcgctcagggcctctggcccaagcctcggacgcaagcctctgacgagcgagcgcgcgctggggcgggtctgcgcaggaacggcaggactgccgagttggttgaatattgaatggttggatgattggtttgctgggtttggttttgacacgcacggcacaggacaagtgagtttggaggttggatttgcgcaggtagaaagggcgctcggcctcagggcctcagcgtcagcagacgagctcgccagtccaggtcagtacccagtgttcgttacttcccaccgtccagagtttgctgctgcctctcagcttgattcgtgtcggagaagtagaaatggtcacagcgtaccacacactgtccccatgcctgcgtcctgctccacgagtgtttagccacaaaaatttatggacaaccttactgagcctgtgctggggggtgctttagcaccagcactggcgccatggcgtcaaggttaattccactgtcattcgacaaccttcaactgatgggggcaactgggcacaaaaccttggatatataaccaactccaactcccacggttttttaccttttgctcttctccccaggactcactacttctactcctctattcatcttcaccaaaatgtgagacctaatatcactgctgtacagacaagactgtgtatattaggtctcaatgaaggcagtcgtgtacacgcaaccagacgcagtggccgtccttgagcgtgaaatgcctgcactggtgccaggagaggtgcttcttcgaattgatgccagcggaatttgcggttccgatttgcacgcatatcatggacatgacccacgtcgtaaacctggacttgtgttgggtcacgagtttgcaggcaccgtggttgcttctagcgatgaaagccgcctccctgtgggtcgacgcgtcacggctaatcccctcgttacatgcggacactgtgattactgccttcagggccgtgacaatctgtgtgcgaatcgtggcatggtgggtatgtctcgccctggtgccctttctgagtatcttgccattcccatgcgatgcgctattgctattcccgaagatctgccgagcgtgtctgctgcgcttaccgaacctgctgcgacggcactgcacgcagtcaatcttacaatgcgagcgatgagccgacctctcccggaggcgcgtgttttgattatcggaggtggagcgatcggcatgttgaccggagcacttgtcggtgcgtacggctgtcgctcccttgcggtcgcggaaaccaacgccctgcgccgtgcgtccgtccgacgtcatcttgcatgcgaggttttggaccctacagcgaacgccccggctgagtcttcgttcgacgtggtcattgacgcagtgggtgcggcaccaacccgccatctggcactggcggcaacgcgaccaggaggtgttatcatgcacattggactccaggcatggtccagcgaaatcgatatgcgtaagctcactcttgctgaaatcactctcctcggtacgtatacatacacgatggcggatatgcatgcgaccgtgcgagcacttgcctctggaagcttcggatctctggaatgggtcgagacgcgagccctgacagatgcgccatctgcttttgctgaccttgctgcgggtcgagtcgcggcgggcaaggttgtgcttctcccgcaacaggactaacacggatcaacaaaaatgtgcgccagctttgttgtgtgcccttttcctctagcggatcctatccacatttcgtgaatgaaccgattaagctctgacgagatttccttgttttctgtagatacctcttgtagaggtgtcaaagttatgttgtgatcgagagagttacctgcaaggtattatgcaagcggcttgatgaggacactcaactacgtgtgagtaggagtgcgttgctcagcagttgacgcgtgagccgcttgagcagcttgataaaggtcctaatcgtcttccagctgttggcagacgacaatgtgctgtagtagtaggataggcccgtaaaagtgtagaagcaataggttgagactgactgtaatgggtacttgcgttcaaagactgaaagtccaaaggattgctcaaaggcccctgaggtctgagcctctgagcgcgctcttcgtcaaaattcgccggggccatcggtcatcctctcgagggcagcatcttcctgcttgaagactgagtccgtctcagataacttcgtataatgtatgctatacgaagttatcctgcaggagctcagaccttgcatgttagccttgaccttgcctctatgaccactaattcgcacaagattgcacgttaccattgtcatcttgccatgtatccaatgtttcctgtttgccatagtacgtagtagatacatcgatcatcgatgcagatgacgcagatggcattggttcgctttgccctatgcatgcatcatgcatcatgcatcatgcgtcatgcgtcactatccatattaatcattgccctctgtactaggccatgacacctgcagacccttccccagggatgcttcttgtaatagccaatatactacacaactttaccgattacgatcgagatcgatctcactatagtttgtcgaacttcgatgcacatcgagggtgcggaaaaaagctgacggaagcggaagtgggtgaattggttaatttagttagattggcagggttgttcccaagattcaacgcaagctgagaaagaaaacagaaacacgaggcataaggccagtcagaaaatgcattacgaggggagttgaagtgactgtgggccagtgcctgggtcgtcatgtgcaaattttttcttcggttagactgccgcagcatgcagcaactctgccggccctatataactagtgcttcatcttcttgtcattcttgtctctttaccaacacaccggtactctttcaccatgggtaaggaaaagacacacgtatcgcgaccccgactcaactccaacatggacgcagacctgtacggatacaaatgggctcgagataatgtcggacagtcgggtgcgacgatctacagactctatggaaaaccggacgcccccgagctctttcttaaacacggcaagggtagcgttgcaaacgacgtaaccgacgaaatggtccgtctgaattggctaactgagttcatgccactccccaccatcaagcacttcatccgtacacctgacgatgcgtggctgttgactacggccatccccggtaagaccgcttttcaggtcctcgaggaataccctgactcgggcgagaacatcgtggatgccttggctgtgtttttgcgccgccttcactctattccggtctgcaactgccctttcaacagcgaccgtgtttttaggcttgcccaggcacaatcacgcatgaacaatggtctagtcgacgctagtgatttcgatgacgagcgcaacggctggccggtggaacaagtgtggaaagagatgcataagctcctgcccttttccccagactctgtcgtgacgcatggtgatttctcgcttgacaacctcatctttgacgagggcaagctcattggctgcattgacgtcggccgggttggcatcgccgatcgctaccaagatcttgcgatcctctggaattgtctgggcgagttctcccctagcctccagaagcgtctgttccagaaatatgggatcg

SEQ ID NO: 51 - DNA, 4624 bp, synthetic construct
  source 1..4624: mol_type = other DNA
tgcagagccttgcaaatgatgaaagaccaatggaattgatcattgattattgatgatgcatgatgaaagagatagaaacagatgcaagatgggatggcgcgatgatcaaatgataatgaacgttcaacccttcaaaattgaaactctcaggctgagcggctgagcaagctctgagaatgtgggtcttcgaagactttcgcttgagcatggtgcatgtgcaaagagatggaatgtggaattgttgtaggtaggaacacagcccggtagagcggcgcagtggctcagcgaagctgggagaacgactgaaccggtcttgagattcatcatctcagcgtgcgtcagcgcgtcagcttcagcgtttgagaatggcacggactgacctgtcgtacatcccaaggaggcccgtgcgctatactcgccttgtggcctaatctgcgatcaacccatcctcaacgaaagcgcaagtagcgactaagcacactatctttcgggtcggtgcggtcacagtatcggcatctctgtctttagctacgatggtgtgcgtgtaactgatcagtacacccgctgtatcaaaactctatcttcaatccgctaagaatcgtcaccatcagtacatcagtacatcagtgggctaagatctaatggtgtcgttcgacggccgcgggcactagccacgagccaagagcggtacagttgctgcgaaatggtgggcagcctgacaggttcagtttgaataggatgaaaacgccatgaagaacagagaagctggcaattgacgatagtggggcgagcgcacgctgcttgctggtccgagcgtaggacgaacgacaaaccatgggcggggccaccaggccccagggagggcgtcactggttggatgtcgtctgttaggctagagctcaggcgctcagggcctctggcccaagcctcggacgcaagcctctgacgagcgagcgcgcgctggggcgggtctgcgcaggaacggcaggactgccgagttggttgaatattgaatggttggatgattggtttgctgggtttggttttgacacgcacggcacaggacaagtgagtttggaggttggatttgcgcaggtagaaagggcgctcggcctcagggcctcagcgtcagcagacgagctcgccagtccaggtcagtacccagtgttcgttacttcccaccgtccagagtttgctgctgcctctcagcttgattcgtgtcggagaagtagaaatggtcacagcgtaccacacactgtccccatgcctgcgtcctgctccacgagtgtttagccacaaaaatttatggacaaccttactgagcctgtgctggggggtgctttagcaccagcactggcgccatggcgtcaaggttaattccactgtcattcgacaaccttcaactgatgggggcaactgggcacaaaaccttggatatataaccaactccaactcccacggttttttaccttttgctcttctccccaggactcactacttctactcctctattcatcttcaccaaaatgtgagacctaatatcactgctgtacagacaagactgtgtatattaggtctcaatgaagtccgtcgttattcacgccgaaggagatgtccgtgtggaagagcgacccattccccatttgcaaacggatgaagatgttttggtgaaagtcgtgtcttccggactttgtggcagcgacattccccgcatcttcaatcgtggcgctcattattacccaatcacacttggccatgaattctcgggctatgtcgagtcctatggagcgggtgtcactgacttgcaaccaggtgatgctgtcgcttgtgtgccgctcctcccgtgttttcactgcccccagtgcgagcgaggttacttctctctgtgtaagcagtatcaatttgtcggttctcgcagcgagggaggaaacgcagagtatgtcgttatgaaacgagcgaatcttttccgactcccgtccgatatgccaattgaagacggagctttcattgagcccatcaccgtcggtctgcatgccttccaccttgcgcagggttgcgagggaaagaatgtcattatcgtgggtgcaggcaccattggcctccttgccctgcaatgtgcacgagaactcggagccaaatcgattaccgcaatcgacatcaacccacagaagcttgcattggcaaaggagctgggcgcgacttacgtgtttaattcccgagaaatgtcggcgaccgaaattcactctgatttggaaaatgtgcagttcgaccaacttattctcgaaacggctggaacgcctcagactgtcacgctctccatcgaaattgcgggtccccgagcccaattggcgcttgttggtacgttgcaccacgatttggcgcttgcgtcgggtgtctttggtcaaatcttgcgcaaagagcttactatcctcggatcttggatgaactacagctctccctggccaggcgaagaatgggtcactgcggcacgtctgctgacggagaaacgtttgcaattggaaccacttattgcgcactccggagatgccgaatcctttgcgtctgcagtgaagtctctcaatggcgcacctatgcaaggtaaaattctgctcaagctttcgtaacacggatcaacaaaaatgtgcgccagctttgttgtgtgcccttttcctctagcggatcctatccacatttcgtgaatgaaccgattaagctctgacgagatttccttgttttctgtagatacctcttgtagaggtgtcaaagttatgttgtgatcgagagagttacctgcaaggtattatgcaagcggcttgatgaggacactcaactacgtgtgagtaggagtgcgttgctcagcagttgacgcgtgagccgcttgagcagcttgataaaggtcctaatcgtcttccagctgttggcagacgacaatgtgctgtagtagtaggataggcccgtaaaagtgtagaagcaataggttgagactgactgtaatgggtacttgcgttcaaagactgaaagtccaaaggattgctcaaaggcccctgaggtctgagcctctgagcgcgctcttcgtcaaaattcgccggggccatcggtcatcctctcgagggcagcatcttcctgcttgaagactgagtccgtctcagataacttcgtataatgtatgctatacgaagttatcctgcaggagctcagaccttgcatgttagccttgaccttgcctctatgaccactaattcgcacaagattgcacgttaccattgtcatcttgccatgtatccaatgtttcctgtttgccatagtacgtagtagatacatcgatcatcgatgcagatgacgcagatggcattggttcgctttgccctatgcatgcatcatgcatcatgcatcatgcgtcatgcgtcactatccatattaatcattgccctctgtactaggccatgacacctgcagacccttccccagggatgcttcttgtaatagccaatatactacacaactttaccgattacgatcgagatcgatctcactatagtttgtcgaacttcgatgcacatcgagggtgcggaaaaaagctgacggaagcggaagtgggtgaattggttaatttagttagattggcagggttgttcccaagattcaacgcaagctgagaaagaaaacagaaacacgaggcataaggccagtcagaaaatgcattacgaggggagttgaagtgactgtgggccagtgcctgggtcgtcatgtgcaaattttttcttcggttagactgccgcagcatgcagcaactctgccggccctatataactagtgcttcatcttcttgtcattcttgtctctttaccaacacaccggtactctttcaccatgggtaaggaaaagacacacgtatcgcgaccccgactcaactccaacatggacgcagacctgtacggatacaaatgggctcgagataatgtcggacagtcgggtgcgacgatctacagactctatggaaaaccggacgcccccgagctctttcttaaacacggcaagggtagcgttgcaaacgacgtaaccgacgaaatggtccgtctgaattggctaactgagttcatgccactccccaccatcaagcacttcatccgtacacctgacgatgcgtggctgttgactacggccatccccggtaagaccgcttttcaggtcctcgaggaataccctgactcgggcgagaacatcgtggatgccttggctgtgtttttgcgccgccttcactctattccggtctgcaactgccctttcaacagcgaccgtgtttttaggcttgcccaggcacaatcacgcatgaacaatggtctagtcgacgctagtgatttcgatgacgagcgcaacggctggccggtggaacaagtgtggaaagagatgcataagctcctgcccttttccccagactctgtcgtgacgcatggtgatttctcgcttgacaacctcatctttgacgagggcaagctcattggctgcattgacgtcggccgggttggcatcgccgatcgctaccaagatcttgcgatcctctggaattgtctgggcgagttctcccctagcctccagaagcgtctgttccagaaatatgggatcg

SEQ ID NO: 52 - DNA, 4621 bp, synthetic construct
  source 1..4621: mol_type = other DNA
tgcagagccttgcaaatgatgaaagaccaatggaattgatcattgattattgatgatgcatgatgaaagagatagaaacagatgcaagatgggatggcgcgatgatcaaatgataatgaacgttcaacccttcaaaattgaaactctcaggctgagcggctgagcaagctctgagaatgtgggtcttcgaagactttcgcttgagcatggtgcatgtgcaaagagatggaatgtggaattgttgtaggtaggaacacagcccggtagagcggcgcagtggctcagcgaagctgggagaacgactgaaccggtcttgagattcatcatctcagcgtgcgtcagcgcgtcagcttcagcgtttgagaatggcacggactgacctgtcgtacatcccaaggaggcccgtgcgctatactcgccttgtggcctaatctgcgatcaacccatcctcaacgaaagcgcaagtagcgactaagcacactatctttcgggtcggtgcggtcacagtatcggcatctctgtctttagctacgatggtgtgcgtgtaactgatcagtacacccgctgtatcaaaactctatcttcaatccgctaagaatcgtcaccatcagtacatcagtacatcagtgggctaagatctaatggtgtcgttcgacggccgcgggcactagccacgagccaagagcggtacagttgctgcgaaatggtgggcagcctgacaggttcagtttgaataggatgaaaacgccatgaagaacagagaagctggcaattgacgatagtggggcgagcgcacgctgcttgctggtccgagcgtaggacgaacgacaaaccatgggcggggccaccaggccccagggagggcgtcactggttggatgtcgtctgttaggctagagctcaggcgctcagggcctctggcccaagcctcggacgcaagcctctgacgagcgagcgcgcgctggggcgggtctgcgcaggaacggcaggactgccgagttggttgaatattgaatggttggatgattggtttgctgggtttggttttgacacgcacggcacaggacaagtgagtttggaggttggatttgcgcaggtagaaagggcgctcggcctcagggcctcagcgtcagcagacgagctcgccagtccaggtcagtacccagtgttcgttacttcccaccgtccagagtttgctgctgcctctcagcttgattcgtgtcggagaagtagaaatggtcacagcgtaccacacactgtccccatgcctgcgtcctgctccacgagtgtttagccacaaaaatttatggacaaccttactgagcctgtgctggggggtgctttagcaccagcactggcgccatggcgtcaaggttaattccactgtcattcgacaaccttcaactgatgggggcaactgggcacaaaaccttggatatataaccaactccaactcccacggttttttaccttttgctcttctccccaggactcactacttctactcctctattcatcttcaccaaaatgtgagacctaatatcactgctgtacagacaagactgtgtatattaggtctcaatgaaatctgttgtgaacgatacggacggtattgttcgtattgcagagtcggtgattcccgaaattaaacaccaagatcaagtgcgtgttaagatcgcctcttccggcctttgtggttctgacctgccgcgcatttttaagaacggagcacactattatcccatcactctcggacacgaattttcgggatacatcgatgcagttggctccggtgtcgatgatcttcatcctggtgacgccgtggcatgtgttccccttctgccctgttttacctgtccagaatgtctgaaaggcttttacagccaatgtgccaagtacgattttattggatcccgtcgtgatggtggtttcgcggagtatatcgtggttaagcgaaaaaacgtgtttgctttgcccactgacatgtctattgaagatggagcctttatcgaaccaattacggttggccttcacgcgttccacctcgcgcaaggttgcgaaaataagaatgtcattattattggcgccggtactatcggcctgcttgcaatccagtgtgccgtcgctctcggtgccaagtctgttaccgccatcgacatctcgtctgaaaaactcgccctggccaagtcttttggagcgatgttgacgttcaattccttggagatgtccgcccctcagatgcaaggagtcctccgagaattgcgattcaatcagttgattctggaaaccgctggcgtgcctaagaccgtggaactggcggtcgagattgctggaccccacgctcaactggccttggttggcactttgcaccaagacttgcatcttacgagcaccacttttggaaaaatcctgcgcaaagagcttactgtcatcggatcttggatgaattattcgtccccttggcctggtcaagaatgggagactgcatctcgtctcctcaccgagcgaaagttgtctctcgaaccgttgattgctcatcgtggcagctttgaatcgttcgctcaggctgtccgagacattgctcgcaatgccatgccaggaaaagtgcttctgattccttaacacggatcaacaaaaatgtgcgccagctttgttgtgtgcccttttcctctagcggatcctatccacatttcgtgaatgaaccgattaagctctgacgagatttccttgttttctgtagatacctcttgtagaggtgtcaaagttatgttgtgatcgagagagttacctgcaaggtattatgcaagcggcttgatgaggacactcaactacgtgtgagtaggagtgcgttgctcagcagttgacgcgtgagccgcttgagcagcttgataaaggtcctaatcgtcttccagctgttggcagacgacaatgtgctgtagtagtaggataggcccgtaaaagtgtagaagcaataggttgagactgactgtaatgggtacttgcgttcaaagactgaaagtccaaaggattgctcaaaggcccctgaggtctgagcctctgagcgcgctcttcgtcaaaattcgccggggccatcggtcatcctctcgagggcagcatcttcctgcttgaagactgagtccgtctcagataacttcgtataatgtatgctatacgaagttatcctgcaggagctcagaccttgcatgttagccttgaccttgcctctatgaccactaattcgcacaagattgcacgttaccattgtcatcttgccatgtatccaatgtttcctgtttgccatagtacgtagtagatacatcgatcatcgatgcagatgacgcagatggcattggttcgctttgccctatgcatgcatcatgcatcatgcatcatgcgtcatgcgtcactatccatattaatcattgccctctgtactaggccatgacacctgcagacccttccccagggatgcttcttgtaatagccaatatactacacaactttaccgattacgatcgagatcgatctcactatagtttgtcgaacttcgatgcacatcgagggtgcggaaaaaagctgacggaagcggaagtgggtgaattggttaatttagttagattggcagggttgttcccaagattcaacgcaagctgagaaagaaaacagaaacacgaggcataaggccagtcagaaaatgcattacgaggggagttgaagtgactgtgggccagtgcctgggtcgtcatgtgcaaattttttcttcggttagactgccgcagcatgcagcaactctgccggccctatataactagtgcttcatcttcttgtcattcttgtctctttaccaacacaccggtactctttcaccatgggtaaggaaaagacacacgtatcgcgaccccgactcaactccaacatggacgcagacctgtacggatacaaatgggctcgagataatgtcggacagtcgggtgcgacgatctacagactctatggaaaaccggacgcccccgagctctttcttaaacacggcaagggtagcgttgcaaacgacgtaaccgacgaaatggtccgtctgaattggctaactgagttcatgccactccccaccatcaagcacttcatccgtacacctgacgatgcgtggctgttgactacggccatccccggtaagaccgcttttcaggtcctcgaggaataccctgactcgggcgagaacatcgtggatgccttggctgtgtttttgcgccgccttcactctattccggtctgcaactgccctttcaacagcgaccgtgtttttaggcttgcccaggcacaatcacgcatgaacaatggtctagtcgacgctagtgatttcgatgacgagcgcaacggctggccggtggaacaagtgtggaaagagatgcataagctcctgcccttttccccagactctgtcgtgacgcatggtgatttctcgcttgacaacctcatctttgacgagggcaagctcattggctgcattgacgtcggccgggttggcatcgccgatcgctaccaagatcttgcgatcctctggaattgtctgggcgagttctcccctagcctccagaagcgtctgttccagaaatatgggatcg

SEQ ID NO: 53 - DNA, 4600 bp, synthetic construct
  source 1..4600: mol_type = other DNA
tgcagagccttgcaaatgatgaaagaccaatggaattgatcattgattattgatgatgcatgatgaaagagatagaaacagatgcaagatgggatggcgcgatgatcaaatgataatgaacgttcaacccttcaaaattgaaactctcaggctgagcggctgagcaagctctgagaatgtgggtcttcgaagactttcgcttgagcatggtgcatgtgcaaagagatggaatgtggaattgttgtaggtaggaacacagcccggtagagcggcgcagtggctcagcgaagctgggagaacgactgaaccggtcttgagattcatcatctcagcgtgcgtcagcgcgtcagcttcagcgtttgagaatggcacggactgacctgtcgtacatcccaaggaggcccgtgcgctatactcgccttgtggcctaatctgcgatcaacccatcctcaacgaaagcgcaagtagcgactaagcacactatctttcgggtcggtgcggtcacagtatcggcatctctgtctttagctacgatggtgtgcgtgtaactgatcagtacacccgctgtatcaaaactctatcttcaatccgctaagaatcgtcaccatcagtacatcagtacatcagtgggctaagatctaatggtgtcgttcgacggccgcgggcactagccacgagccaagagcggtacagttgctgcgaaatggtgggcagcctgacaggttcagtttgaataggatgaaaacgccatgaagaacagagaagctggcaattgacgatagtggggcgagcgcacgctgcttgctggtccgagcgtaggacgaacgacaaaccatgggcggggccaccaggccccagggagggcgtcactggttggatgtcgtctgttaggctagagctcaggcgctcagggcctctggcccaagcctcggacgcaagcctctgacgagcgagcgcgcgctggggcgggtctgcgcaggaacggcaggactgccgagttggttgaatattgaatggttggatgattggtttgctgggtttggttttgacacgcacggcacaggacaagtgagtttggaggttggatttgcgcaggtagaaagggcgctcggcctcagggcctcagcgtcagcagacgagctcgccagtccaggtcagtacccagtgttcgttacttcccaccgtccagagtttgctgctgcctctcagcttgattcgtgtcggagaagtagaaatggtcacagcgtaccacacactgtccccatgcctgcgtcctgctccacgagtgtttagccacaaaaatttatggacaaccttactgagcctgtgctggggggtgctttagcaccagcactggcgccatggcgtcaaggttaattccactgtcattcgacaaccttcaactgatgggggcaactgggcacaaaaccttggatatataaccaactccaactcccacggttttttaccttttgctcttctccccaggactcactacttctactcctctattcatcttcaccaaaatgtgagacctaatatcactgctgtacagacaagactgtgtatattaggtctcaatgaaatctattctgattgagaaaccaaaccaattggccattgttgaacgtgaaatcccaactccatccgccggtgaagttcgtgtgaaagtgaagctggcgggaatctgcggatccgattcccatatttaccgtggtcataacccatttgcaaaatatcctcgtgtgatcggacacgaattttttggtgtcattgacgcagtcggagaaggtgttgaaagcgcccgcgttggtgaacgagttgcagtggatcccgtggtgtcgtgcggccattgctatccctgctctatcggaaagcccaatgtttgtactaccttggcggtgctgggcgtgcatgcggacggaggcttctctgagtacgcggtggttccggccaagaacgcgtggaagattcccgaggcagttgccgatcaatatgccgtgatgattgagccgtttacaatcgccgcgaacgtgacgggacacggtcagccaactgaaaatgacactgttctggtgtatggcgctggacccattggcctcacaattgttcaagtcctgaaaggagtgtataatgtcaaaaacgtgattgtcgccgatcgaattgacgagcgacttgagaaggccaaggaatccggagctgactgggctattaataatagccagacaccgctgggcgagattttcactgaaaaaggcattaagccgacgctgattattgatgccgcttgtcacccctcgattctgaaggaggcggtgacgctggcttctccagcggcacgtattgttctgatgggattctcgtctgaaccatctgaagttattcagcaaggaattacgggcaaggagctctctattttctccagccgccttaacgcaaacaagttccccatcgtgatcgattggctctccaagggcctgattaaaccagaaaagctcattacgcacacgtttgattttcaacatgttgcggacgctatcagcctttttgagcaagaccagaaacactgctgtaaggtgctgctcactttctccgagtaacacggatcaacaaaaatgtgcgccagctttgttgtgtgcccttttcctctagcggatcctatccacatttcgtgaatgaaccgattaagctctgacgagatttccttgttttctgtagatacctcttgtagaggtgtcaaagttatgttgtgatcgagagagttacctgcaaggtattatgcaagcggcttgatgaggacactcaactacgtgtgagtaggagtgcgttgctcagcagttgacgcgtgagccgcttgagcagcttgataaaggtcctaatcgtcttccagctgttggcagacgacaatgtgctgtagtagtaggataggcccgtaaaagtgtagaagcaataggttgagactgactgtaatgggtacttgcgttcaaagactgaaagtccaaaggattgctcaaaggcccctgaggtctgagcctctgagcgcgctcttcgtcaaaattcgccggggccatcggtcatcctctcgagggcagcatcttcctgcttgaagactgagtccgtctcagataacttcgtataatgtatgctatacgaagttatcctgcaggagctcagaccttgcatgttagccttgaccttgcctctatgaccactaattcgcacaagattgcacgttaccattgtcatcttgccatgtatccaatgtttcctgtttgccatagtacgtagtagatacatcgatcatcgatgcagatgacgcagatggcattggttcgctttgccctatgcatgcatcatgcatcatgcatcatgcgtcatgcgtcactatccatattaatcattgccctctgtactaggccatgacacctgcagacccttccccagggatgcttcttgtaatagccaatatactacacaactttaccgattacgatcgagatcgatctcactatagtttgtcgaacttcgatgcacatcgagggtgcggaaaaaagctgacggaagcggaagtgggtgaattggttaatttagttagattggcagggttgttcccaagattcaacgcaagctgagaaagaaaacagaaacacgaggcataaggccagtcagaaaatgcattacgaggggagttgaagtgactgtgggccagtgcctgggtcgtcatgtgcaaattttttcttcggttagactgccgcagcatgcagcaactctgccggccctatataactagtgcttcatcttcttgtcattcttgtctctttaccaacacaccggtactctttcaccatgggtaaggaaaagacacacgtatcgcgaccccgactcaactccaacatggacgcagacctgtacggatacaaatgggctcgagataatgtcggacagtcgggtgcgacgatctacagactctatggaaaaccggacgcccccgagctctttcttaaacacggcaagggtagcgttgcaaacgacgtaaccgacgaaatggtccgtctgaattggctaactgagttcatgccactccccaccatcaagcacttcatccgtacacctgacgatgcgtggctgttgactacggccatccccggtaagaccgcttttcaggtcctcgaggaataccctgactcgggcgagaacatcgtggatgccttggctgtgtttttgcgccgccttcactctattccggtctgcaactgccctttcaacagcgaccgtgtttttaggcttgcccaggcacaatcacgcatgaacaatggtctagtcgacgctagtgatttcgatgacgagcgcaacggctggccggtggaacaagtgtggaaagagatgcataagctcctgcccttttccccagactctgtcgtgacgcatggtgatttctcgcttgacaacctcatctttgacgagggcaagctcattggctgcattgacgtcggccgggttggcatcgccgatcgctaccaagatcttgcgatcctctggaattgtctgggcgagttctcccctagcctccagaagcgtctgttccagaaatatgggatcg

SEQ ID NO: 54 - DNA, 4654 bp, synthetic construct
  source 1..4654: mol_type = other DNA
tgcagagccttgcaaatgatgaaagaccaatggaattgatcattgattattgatgatgcatgatgaaagagatagaaacagatgcaagatgggatggcgcgatgatcaaatgataatgaacgttcaacccttcaaaattgaaactctcaggctgagcggctgagcaagctctgagaatgtgggtcttcgaagactttcgcttgagcatggtgcatgtgcaaagagatggaatgtggaattgttgtaggtaggaacacagcccggtagagcggcgcagtggctcagcgaagctgggagaacgactgaaccggtcttgagattcatcatctcagcgtgcgtcagcgcgtcagcttcagcgtttgagaatggcacggactgacctgtcgtacatcccaaggaggcccgtgcgctatactcgccttgtggcctaatctgcgatcaacccatcctcaacgaaagcgcaagtagcgactaagcacactatctttcgggtcggtgcggtcacagtatcggcatctctgtctttagctacgatggtgtgcgtgtaactgatcagtacacccgctgtatcaaaactctatcttcaatccgctaagaatcgtcaccatcagtacatcagtacatcagtgggctaagatctaatggtgtcgttcgacggccgcgggcactagccacgagccaagagcggtacagttgctgcgaaatggtgggcagcctgacaggttcagtttgaataggatgaaaacgccatgaagaacagagaagctggcaattgacgatagtggggcgagcgcacgctgcttgctggtccgagcgtaggacgaacgacaaaccatgggcggggccaccaggccccagggagggcgtcactggttggatgtcgtctgttaggctagagctcaggcgctcagggcctctggcccaagcctcggacgcaagcctctgacgagcgagcgcgcgctggggcgggtctgcgcaggaacggcaggactgccgagttggttgaatattgaatggttggatgattggtttgctgggtttggttttgacacgcacggcacaggacaagtgagtttggaggttggatttgcgcaggtagaaagggcgctcggcctcagggcctcagcgtcagcagacgagctcgccagtccaggtcagtacccagtgttcgttacttcccaccgtccagagtttgctgctgcctctcagcttgattcgtgtcggagaagtagaaatggtcacagcgtaccacacactgtccccatgcctgcgtcctgctccacgagtgtttagccacaaaaatttatggacaaccttactgagcctgtgctggggggtgctttagcaccagcactggcgccatggcgtcaaggttaattccactgtcattcgacaaccttcaactgatgggggcaactgggcacaaaaccttggatatataaccaactccaactcccacggttttttaccttttgctcttctccccaggactcactacttctactcctctattcatcttcaccaaaatgtgagacctaatatcactgctgtacagacaagactgtgtatattaggtctcaatgaacattccgaccaagatgaaggcagtcgttaaatcggaggcaggttatgacaatatgtccctgcaagagattcctgtcccagaagttaagggaaaacaggtgttgatgaaagtcgcctatacgggtatctgcggtacggacattcatacctttaaaggcgagtacgccaatgccgtgaccccacttgtcctcggccatgaattttctggcaaggtcgttgccgtcggagatgaagttaccaaggtcaaaccgggtgaccgagttacctccgaaacaacatttgatacatgcggagagtgtgtgtactgtaaaaataaggaatataacctgtgcgaaaaccgttcgggtattggtacgaaagccaatggatcgatggctaattatgtgcttacgcgagaggagtctgtgcatgtccttcctgacaatgtttcctacaaacttgccgcgatgtctgagccgctggcttcctgtgtgcacgcaatgtaccagaaaaccccgttcacccttcatgatacagttctcattatcggccccggacctatgggtttgctctctctgcagattgcaaaggaaattggagcctttaccatcgtctccggtattacgaaagacagcgaccgcctggaaatcgcaaaagaacttggagccgacatcgttgttgacacgcagaaggaagacttggcgaagatcgtcatggaggctactaacggagtgggagttaccaaagtctatgattgtagcggcgctacaccagcggtgaatgctgccctcccccttctgaagaagggaggtacttttcagcaggttggcctgtttgcaaagcctctgaacgaattggatgaacgtacaattattcagcacgaaattacatacgtgggatcccgttctcagaatccgtatgattggcctatcgccattcacctggaggccaaaggtgctattaatgaagataaaatggttacgaaagtcttcgatttggatcattggcgtgaggcattcgaggctatgatggctggaaaagaactcaaggttcttattgccagcaatccagacgacgaaactcttaattaacacggatcaacaaaaatgtgcgccagctttgttgtgtgcccttttcctctagcggatcctatccacatttcgtgaatgaaccgattaagctctgacgagatttccttgttttctgtagatacctcttgtagaggtgtcaaagttatgttgtgatcgagagagttacctgcaaggtattatgcaagcggcttgatgaggacactcaactacgtgtgagtaggagtgcgttgctcagcagttgacgcgtgagccgcttgagcagcttgataaaggtcctaatcgtcttccagctgttggcagacgacaatgtgctgtagtagtaggataggcccgtaaaagtgtagaagcaataggttgagactgactgtaatgggtacttgcgttcaaagactgaaagtccaaaggattgctcaaaggcccctgaggtctgagcctctgagcgcgctcttcgtcaaaattcgccggggccatcggtcatcctctcgagggcagcatcttcctgcttgaagactgagtccgtctcagataacttcgtataatgtatgctatacgaagttatcctgcaggagctcagaccttgcatgttagccttgaccttgcctctatgaccactaattcgcacaagattgcacgttaccattgtcatcttgccatgtatccaatgtttcctgtttgccatagtacgtagtagatacatcgatcatcgatgcagatgacgcagatggcattggttcgctttgccctatgcatgcatcatgcatcatgcatcatgcgtcatgcgtcactatccatattaatcattgccctctgtactaggccatgacacctgcagacccttccccagggatgcttcttgtaatagccaatatactacacaactttaccgattacgatcgagatcgatctcactatagtttgtcgaacttcgatgcacatcgagggtgcggaaaaaagctgacggaagcggaagtgggtgaattggttaatttagttagattggcagggttgttcccaagattcaacgcaagctgagaaagaaaacagaaacacgaggcataaggccagtcagaaaatgcattacgaggggagttgaagtgactgtgggccagtgcctgggtcgtcatgtgcaaattttttcttcggttagactgccgcagcatgcagcaactctgccggccctatataactagtgcttcatcttcttgtcattcttgtctctttaccaacacaccggtactctttcaccatgggtaaggaaaagacacacgtatcgcgaccccgactcaactccaacatggacgcagacctgtacggatacaaatgggctcgagataatgtcggacagtcgggtgcgacgatctacagactctatggaaaaccggacgcccccgagctctttcttaaacacggcaagggtagcgttgcaaacgacgtaaccgacgaaatggtccgtctgaattggctaactgagttcatgccactccccaccatcaagcacttcatccgtacacctgacgatgcgtggctgttgactacggccatccccggtaagaccgcttttcaggtcctcgaggaataccctgactcgggcgagaacatcgtggatgccttggctgtgtttttgcgccgccttcactctattccggtctgcaactgccctttcaacagcgaccgtgtttttaggcttgcccaggcacaatcacgcatgaacaatggtctagtcgacgctagtgatttcgatgacgagcgcaacggctggccggtggaacaagtgtggaaagagatgcataagctcctgcccttttccccagactctgtcgtgacgcatggtgatttctcgcttgacaacctcatctttgacgagggcaagctcattggctgcattgacgtcggccgggttggcatcgccgatcgctaccaagatcttgcgatcctctggaattgtctgggcgagttctcccctagcctccagaagcgtctgttccagaaatatgggatcg

SEQ ID NO: 55 - DNA, 4579 bp, synthetic construct
  source 1..4579: mol_type = other DNA
tgcagagccttgcaaatgatgaaagaccaatggaattgatcattgattattgatgatgcatgatgaaagagatagaaacagatgcaagatgggatggcgcgatgatcaaatgataatgaacgttcaacccttcaaaattgaaactctcaggctgagcggctgagcaagctctgagaatgtgggtcttcgaagactttcgcttgagcatggtgcatgtgcaaagagatggaatgtggaattgttgtaggtaggaacacagcccggtagagcggcgcagtggctcagcgaagctgggagaacgactgaaccggtcttgagattcatcatctcagcgtgcgtcagcgcgtcagcttcagcgtttgagaatggcacggactgacctgtcgtacatcccaaggaggcccgtgcgctatactcgccttgtggcctaatctgcgatcaacccatcctcaacgaaagcgcaagtagcgactaagcacactatctttcgggtcggtgcggtcacagtatcggcatctctgtctttagctacgatggtgtgcgtgtaactgatcagtacacccgctgtatcaaaactctatcttcaatccgctaagaatcgtcaccatcagtacatcagtacatcagtgggctaagatctaatggtgtcgttcgacggccgcgggcactagccacgagccaagagcggtacagttgctgcgaaatggtgggcagcctgacaggttcagtttgaataggatgaaaacgccatgaagaacagagaagctggcaattgacgatagtggggcgagcgcacgctgcttgctggtccgagcgtaggacgaacgacaaaccatgggcggggccaccaggccccagggagggcgtcactggttggatgtcgtctgttaggctagagctcaggcgctcagggcctctggcccaagcctcggacgcaagcctctgacgagcgagcgcgcgctggggcgggtctgcgcaggaacggcaggactgccgagttggttgaatattgaatggttggatgattggtttgctgggtttggttttgacacgcacggcacaggacaagtgagtttggaggttggatttgcgcaggtagaaagggcgctcggcctcagggcctcagcgtcagcagacgagctcgccagtccaggtcagtacccagtgttcgttacttcccaccgtccagagtttgctgctgcctctcagcttgattcgtgtcggagaagtagaaatggtcacagcgtaccacacactgtccccatgcctgcgtcctgctccacgagtgtttagccacaaaaatttatggacaaccttactgagcctgtgctggggggtgctttagcaccagcactggcgccatggcgtcaaggttaattccactgtcattcgacaaccttcaactgatgggggcaactgggcacaaaaccttggatatataaccaactccaactcccacggttttttaccttttgctcttctccccaggactcactacttctactcctctattcatcttcaccaaaatgaaagccgcggtcctccatggaacgaacgacatgcgcttcgaggatattgaaatcaagccgtgcgaaagcgacgaggtcaagatcaaggtcatggccgctggcatttgtggatctgatcccccccgagtgctgaaacattggaagtatcctgttccggctattcctggacatgagttctctggtgttatcgcggaggtcggaaaagatgtgaaaaatgtcaaggtgggtgaccgagttgtggcgatcccctttattccgtgtaatgaatgtgagtactgtaaacgaggtctttttagcctttgtgacgatcacggaatgctgggtgccaaatcctttggagcatttgccgagtatgtgaacattaaggcgactaatgtccttcccatcggcgatatggatttcgaagacgcagcgatgattgagccccttgccgtcgccatgcacggagtgttgaacatcggagttcaagtgggagatacggtcgccgtcatgggctcgggcacaatgggtcaacttgtgattcagggtcttaaaattgctggtgctggcactatcattgctgttgacatttctgataacaaactgcgagagtccaaggaattgggcgctgacattatcattaacgcaaaggacattaaccctgttgaaaaaatcaaagagcttacaggcggaaaaggagtggacatcgctctggaatgtgcgggttccaaaattacccaagagcaatgcctcttgatcactaaaaaaaagtcgaagatcggtttcctgggaattgcgtactctgacattaccttgtcggaggaggcgttcgagaacatctttcgcaaagagctcgaacttaaaggattctggaacagctattcggcaccctttcctggccaagagtggaccaagggcattaatcttgttaacgagggaaaaattaagctgaaggaaatggtttcgcaccgcttttctcttgaggatacgtataaagcgttcgagatgatccgagatcgcaaggaagagtttaacaaaatcctgatccttccccagggcgtggaaaaataacacggatcaacaaaaatgtgcgccagctttgttgtgtgcccttttcctctagcggatcctatccacatttcgtgaatgaaccgattaagctctgacgagatttccttgttttctgtagatacctcttgtagaggtgtcaaagttatgttgtgatcgagagagttacctgcaaggtattatgcaagcggcttgatgaggacactcaactacgtgtgagtaggagtgcgttgctcagcagttgacgcgtgagccgcttgagcagcttgataaaggtcctaatcgtcttccagctgttggcagacgacaatgtgctgtagtagtaggataggcccgtaaaagtgtagaagcaataggttgagactgactgtaatgggtacttgcgttcaaagactgaaagtccaaaggattgctcaaaggcccctgaggtctgagcctctgagcgcgctcttcgtcaaaattcgccggggccatcggtcatcctctcgagggcagcatcttcctgcttgaagactgagtccgtctcagataacttcgtataatgtatgctatacgaagttatcctgcaggagctcagaccttgcatgttagccttgaccttgcctctatgaccactaattcgcacaagattgcacgttaccattgtcatcttgccatgtatccaatgtttcctgtttgccatagtacgtagtagatacatcgatcatcgatgcagatgacgcagatggcattggttcgctttgccctatgcatgcatcatgcatcatgcatcatgcgtcatgcgtcactatccatattaatcattgccctctgtactaggccatgacacctgcagacccttccccagggatgcttcttgtaatagccaatatactacacaactttaccgattacgatcgagatcgatctcactatagtttgtcgaacttcgatgcacatcgagggtgcggaaaaaagctgacggaagcggaagtgggtgaattggttaatttagttagattggcagggttgttcccaagattcaacgcaagctgagaaagaaaacagaaacacgaggcataaggccagtcagaaaatgcattacgaggggagttgaagtgactgtgggccagtgcctgggtcgtcatgtgcaaattttttcttcggttagactgccgcagcatgcagcaactctgccggccctatataactagtgcttcatcttcttgtcattcttgtctctttaccaacacaccggtactctttcaccatgggtaaggaaaagacacacgtatcgcgaccccgactcaactccaacatggacgcagacctgtacggatacaaatgggctcgagataatgtcggacagtcgggtgcgacgatctacagactctatggaaaaccggacgcccccgagctctttcttaaacacggcaagggtagcgttgcaaacgacgtaaccgacgaaatggtccgtctgaattggctaactgagttcatgccactccccaccatcaagcacttcatccgtacacctgacgatgcgtggctgttgactacggccatccccggtaagaccgcttttcaggtcctcgaggaataccctgactcgggcgagaacatcgtggatgccttggctgtgtttttgcgccgccttcactctattccggtctgcaactgccctttcaacagcgaccgtgtttttaggcttgcccaggcacaatcacgcatgaacaatggtctagtcgacgctagtgatttcgatgacgagcgcaacggctggccggtggaacaagtgtggaaagagatgcataagctcctgcccttttccccagactctgtcgtgacgcatggtgatttctcgcttgacaacctcatctttgacgagggcaagctcattggctgcattgacgtcggccgggttggcatcgccgatcgctaccaagatcttgcgatcctctggaattgtctgggcgagttctcccctagcctccagaagcgtctgttccagaaatatgggatcg

SEQ ID NO: 56 - DNA, 4633 bp, synthetic construct
  source 1..4633: mol_type = other DNA
tgcagagccttgcaaatgatgaaagaccaatggaattgatcattgattattgatgatgcatgatgaaagagatagaaacagatgcaagatgggatggcgcgatgatcaaatgataatgaacgttcaacccttcaaaattgaaactctcaggctgagcggctgagcaagctctgagaatgtgggtcttcgaagactttcgcttgagcatggtgcatgtgcaaagagatggaatgtggaattgttgtaggtaggaacacagcccggtagagcggcgcagtggctcagcgaagctgggagaacgactgaaccggtcttgagattcatcatctcagcgtgcgtcagcgcgtcagcttcagcgtttgagaatggcacggactgacctgtcgtacatcccaaggaggcccgtgcgctatactcgccttgtggcctaatctgcgatcaacccatcctcaacgaaagcgcaagtagcgactaagcacactatctttcgggtcggtgcggtcacagtatcggcatctctgtctttagctacgatggtgtgcgtgtaactgatcagtacacccgctgtatcaaaactctatcttcaatccgctaagaatcgtcaccatcagtacatcagtacatcagtgggctaagatctaatggtgtcgttcgacggccgcgggcactagccacgagccaagagcggtacagttgctgcgaaatggtgggcagcctgacaggttcagtttgaataggatgaaaacgccatgaagaacagagaagctggcaattgacgatagtggggcgagcgcacgctgcttgctggtccgagcgtaggacgaacgacaaaccatgggcggggccaccaggccccagggagggcgtcactggttggatgtcgtctgttaggctagagctcaggcgctcagggcctctggcccaagcctcggacgcaagcctctgacgagcgagcgcgcgctggggcgggtctgcgcaggaacggcaggactgccgagttggttgaatattgaatggttggatgattggtttgctgggtttggttttgacacgcacggcacaggacaagtgagtttggaggttggatttgcgcaggtagaaagggcgctcggcctcagggcctcagcgtcagcagacgagctcgccagtccaggtcagtacccagtgttcgttacttcccaccgtccagagtttgctgctgcctctcagcttgattcgtgtcggagaagtagaaatggtcacagcgtaccacacactgtccccatgcctgcgtcctgctccacgagtgtttagccacaaaaatttatggacaaccttactgagcctgtgctggggggtgctttagcaccagcactggcgccatggcgtcaaggttaattccactgtcattcgacaaccttcaactgatgggggcaactgggcacaaaaccttggatatataaccaactccaactcccacggttttttaccttttgctcttctccccaggactcactacttctactcctctattcatcttcaccaaaatgtgagacctaatatcactgctgtacagacaagactgtgtatattaggtctcaatgaagtcggtccgattttatggaattcgtgatacacgagtcgaagacgttgacgtgcccaagattctggaaaaggatgacgtcattatcaaggtcaaggtggcgggcatctgtggttctgacattagcaaatactcgaaaacaggcccgcacatggttggcgagattttgggacacgagttctccggcgaggtcgctcaggtcggcaaggaagttcgctccttcaagatcggagatcgagtcgcagtttgccctgcgatgccctgcttcgagtgtgatgagtgcaaaaaaggtttgtattcccgttgcaataatgtcgctatcatcggaaataaggagctcggaggatgttttgcggagtacacgaaagttaaagagcgcaatctgattaaaattccagatgagattagctacgaaaccgctgcggcccttgaacccgtctgtatcgcaggacatggtcttttccgctctgaagccaaggtcggagatacggtcgttgtgctgggaacgggtcctatcggattgttcagcattcagtgggccaaaatctttggttccacgaagattatcgcggttgacgtgtttgacgaaaaactggacttggcgaaagagctcggtgcggatatttgtattaatgctaaggagaaaaatatcgttgaagagatcaaacgactgacagacggagatggtgcagatattgtcattgagtctgccggtaccccgcttacatgtggccaggtgcttctgctggcgaaaaaaggtggtactgtcttgtatgcaggcgtcccatacggcgacgtcgcccttactcgagaacaatttgagaaaatcgttcgaagcgagcttacggtgaaaggaacttggtttggcaattctttcccatttccgggaaaggaatggtctgctggcctgtaccacatgcagaaaggagacatgaacgtggaaaagcttgtcactcaccgtatcaatctggaagaagctccagcatacttcgagaaggtttataaacgtgatatcttctttggtaagattatgattaatattgacaattaacacggatcaacaaaaatgtgcgccagctttgttgtgtgcccttttcctctagcggatcctatccacatttcgtgaatgaaccgattaagctctgacgagatttccttgttttctgtagatacctcttgtagaggtgtcaaagttatgttgtgatcgagagagttacctgcaaggtattatgcaagcggcttgatgaggacactcaactacgtgtgagtaggagtgcgttgctcagcagttgacgcgtgagccgcttgagcagcttgataaaggtcctaatcgtcttccagctgttggcagacgacaatgtgctgtagtagtaggataggcccgtaaaagtgtagaagcaataggttgagactgactgtaatgggtacttgcgttcaaagactgaaagtccaaaggattgctcaaaggcccctgaggtctgagcctctgagcgcgctcttcgtcaaaattcgccggggccatcggtcatcctctcgagggcagcatcttcctgcttgaagactgagtccgtctcagataacttcgtataatgtatgctatacgaagttatcctgcaggagctcagaccttgcatgttagccttgaccttgcctctatgaccactaattcgcacaagattgcacgttaccattgtcatcttgccatgtatccaatgtttcctgtttgccatagtacgtagtagatacatcgatcatcgatgcagatgacgcagatggcattggttcgctttgccctatgcatgcatcatgcatcatgcatcatgcgtcatgcgtcactatccatattaatcattgccctctgtactaggccatgacacctgcagacccttccccagggatgcttcttgtaatagccaatatactacacaactttaccgattacgatcgagatcgatctcactatagtttgtcgaacttcgatgcacatcgagggtgcggaaaaaagctgacggaagcggaagtgggtgaattggttaatttagttagattggcagggttgttcccaagattcaacgcaagctgagaaagaaaacagaaacacgaggcataaggccagtcagaaaatgcattacgaggggagttgaagtgactgtgggccagtgcctgggtcgtcatgtgcaaattttttcttcggttagactgccgcagcatgcagcaactctgccggccctatataactagtgcttcatcttcttgtcattcttgtctctttaccaacacaccggtactctttcaccatgggtaaggaaaagacacacgtatcgcgaccccgactcaactccaacatggacgcagacctgtacggatacaaatgggctcgagataatgtcggacagtcgggtgcgacgatctacagactctatggaaaaccggacgcccccgagctctttcttaaacacggcaagggtagcgttgcaaacgacgtaaccgacgaaatggtccgtctgaattggctaactgagttcatgccactccccaccatcaagcacttcatccgtacacctgacgatgcgtggctgttgactacggccatccccggtaagaccgcttttcaggtcctcgaggaataccctgactcgggcgagaacatcgtggatgccttggctgtgtttttgcgccgccttcactctattccggtctgcaactgccctttcaacagcgaccgtgtttttaggcttgcccaggcacaatcacgcatgaacaatggtctagtcgacgctagtgatttcgatgacgagcgcaacggctggccggtggaacaagtgtggaaagagatgcataagctcctgcccttttccccagactctgtcgtgacgcatggtgatttctcgcttgacaacctcatctttgacgagggcaagctcattggctgcattgacgtcggccgggttggcatcgccgatcgctaccaagatcttgcgatcctctggaattgtctgggcgagttctcccctagcctccagaagcgtctgttccagaaatatgggatcg

SEQ ID NO: 57 - DNA, 4576 bp, synthetic construct
  source 1..4576: mol_type = other DNA
tgcagagccttgcaaatgatgaaagaccaatggaattgatcattgattattgatgatgcatgatgaaagagatagaaacagatgcaagatgggatggcgcgatgatcaaatgataatgaacgttcaacccttcaaaattgaaactctcaggctgagcggctgagcaagctctgagaatgtgggtcttcgaagactttcgcttgagcatggtgcatgtgcaaagagatggaatgtggaattgttgtaggtaggaacacagcccggtagagcggcgcagtggctcagcgaagctgggagaacgactgaaccggtcttgagattcatcatctcagcgtgcgtcagcgcgtcagcttcagcgtttgagaatggcacggactgacctgtcgtacatcccaaggaggcccgtgcgctatactcgccttgtggcctaatctgcgatcaacccatcctcaacgaaagcgcaagtagcgactaagcacactatctttcgggtcggtgcggtcacagtatcggcatctctgtctttagctacgatggtgtgcgtgtaactgatcagtacacccgctgtatcaaaactctatcttcaatccgctaagaatcgtcaccatcagtacatcagtacatcagtgggctaagatctaatggtgtcgttcgacggccgcgggcactagccacgagccaagagcggtacagttgctgcgaaatggtgggcagcctgacaggttcagtttgaataggatgaaaacgccatgaagaacagagaagctggcaattgacgatagtggggcgagcgcacgctgcttgctggtccgagcgtaggacgaacgacaaaccatgggcggggccaccaggccccagggagggcgtcactggttggatgtcgtctgttaggctagagctcaggcgctcagggcctctggcccaagcctcggacgcaagcctctgacgagcgagcgcgcgctggggcgggtctgcgcaggaacggcaggactgccgagttggttgaatattgaatggttggatgattggtttgctgggtttggttttgacacgcacggcacaggacaagtgagtttggaggttggatttgcgcaggtagaaagggcgctcggcctcagggcctcagcgtcagcagacgagctcgccagtccaggtcagtacccagtgttcgttacttcccaccgtccagagtttgctgctgcctctcagcttgattcgtgtcggagaagtagaaatggtcacagcgtaccacacactgtccccatgcctgcgtcctgctccacgagtgtttagccacaaaaatttatggacaaccttactgagcctgtgctggggggtgctttagcaccagcactggcgccatggcgtcaaggttaattccactgtcattcgacaaccttcaactgatgggggcaactgggcacaaaaccttggatatataaccaactccaactcccacggttttttaccttttgctcttctccccaggactcactacttctactcctctattcatcttcaccaaaatgaaagcttccatgctggaggacttgaacaaattcagcgtcaaagagatcgacatcccgtcccccaaaaaggatgaggtcgtcgtgaaggtgatggcggcaggcacgtgtggatccgattcgcataaaatgattagcggatggaaatatggctatcccgcggtgatgggacacgaattttctggaattgtgacacaactgggagaaaacgtgtccaacgtcagcgtcggtcaacacgtcgccgtggctcccttcattccctgcttcaagtgtcattattgtcaaatcggactcttccagatgtgtgaaaattattccatgctcggtcagcaaaaatttggaggtttcgagcaatacgtttccgtcccggcacgtaacgttctggacatcggcaagatgtcgttcgaggaaggtgcccttattgaaccgatggcagttgcggcccacgctgttatgggaattaaaccggagctgggtgatacagttgcggtcttcggcctcggtacagtcggagatcttgttgtccgtcttcttatttcctcgggagcgacaaacgtcattggcattgacattgacgaccagaagcttgaaaagggactggatgagggttgcacacacgtgatcaactctgccaaagagtctcttgaagaaaagatcatggaatacaccgacggtctgggtgtcgatatttccatggaatgcgccggcagcaaaatcactgaggagcaaacactgctcgttacgaaacgccgtggaaaggttggatttgtcggtattgcttatagcgacgttctgctccatcagaaagcatttgagaacatcttccgccacgagcttacggtgactggattttggaattcctattccgcaccatttcctggacgcgagtggaccaactcgatccaattggttaatcgtggtcgtatcaagatcaaagatctcattactcatcgatttgagcttgaagacatgcaaaaagcattcaatatgatcaccactcgttcggaatcgtttaataaggtcatgtttttccccaacggcatcaattaacacggatcaacaaaaatgtgcgccagctttgttgtgtgcccttttcctctagcggatcctatccacatttcgtgaatgaaccgattaagctctgacgagatttccttgttttctgtagatacctcttgtagaggtgtcaaagttatgttgtgatcgagagagttacctgcaaggtattatgcaagcggcttgatgaggacactcaactacgtgtgagtaggagtgcgttgctcagcagttgacgcgtgagccgcttgagcagcttgataaaggtcctaatcgtcttccagctgttggcagacgacaatgtgctgtagtagtaggataggcccgtaaaagtgtagaagcaataggttgagactgactgtaatgggtacttgcgttcaaagactgaaagtccaaaggattgctcaaaggcccctgaggtctgagcctctgagcgcgctcttcgtcaaaattcgccggggccatcggtcatcctctcgagggcagcatcttcctgcttgaagactgagtccgtctcagataacttcgtataatgtatgctatacgaagttatcctgcaggagctcagaccttgcatgttagccttgaccttgcctctatgaccactaattcgcacaagattgcacgttaccattgtcatcttgccatgtatccaatgtttcctgtttgccatagtacgtagtagatacatcgatcatcgatgcagatgacgcagatggcattggttcgctttgccctatgcatgcatcatgcatcatgcatcatgcgtcatgcgtcactatccatattaatcattgccctctgtactaggccatgacacctgcagacccttccccagggatgcttcttgtaatagccaatatactacacaactttaccgattacgatcgagatcgatctcactatagtttgtcgaacttcgatgcacatcgagggtgcggaaaaaagctgacggaagcggaagtgggtgaattggttaatttagttagattggcagggttgttcccaagattcaacgcaagctgagaaagaaaacagaaacacgaggcataaggccagtcagaaaatgcattacgaggggagttgaagtgactgtgggccagtgcctgggtcgtcatgtgcaaattttttcttcggttagactgccgcagcatgcagcaactctgccggccctatataactagtgcttcatcttcttgtcattcttgtctctttaccaacacaccggtactctttcaccatgggtaaggaaaagacacacgtatcgcgaccccgactcaactccaacatggacgcagacctgtacggatacaaatgggctcgagataatgtcggacagtcgggtgcgacgatctacagactctatggaaaaccggacgcccccgagctctttcttaaacacggcaagggtagcgttgcaaacgacgtaaccgacgaaatggtccgtctgaattggctaactgagttcatgccactccccaccatcaagcacttcatccgtacacctgacgatgcgtggctgttgactacggccatccccggtaagaccgcttttcaggtcctcgaggaataccctgactcgggcgagaacatcgtggatgccttggctgtgtttttgcgccgccttcactctattccggtctgcaactgccctttcaacagcgaccgtgtttttaggcttgcccaggcacaatcacgcatgaacaatggtctagtcgacgctagtgatttcgatgacgagcgcaacggctggccggtggaacaagtgtggaaagagatgcataagctcctgcccttttccccagactctgtcgtgacgcatggtgatttctcgcttgacaacctcatctttgacgagggcaagctcattggctgcattgacgtcggccgggttggcatcgccgatcgctaccaagatcttgcgatcctctggaattgtctgggcgagttctcccctagcctccagaagcgtctgttccagaaatatgggatcg

SEQ ID NO: 58 - DNA, 4645 bp, synthetic construct
  source 1..4645: mol_type = other DNA
tgcagagccttgcaaatgatgaaagaccaatggaattgatcattgattattgatgatgcatgatgaaagagatagaaacagatgcaagatgggatggcgcgatgatcaaatgataatgaacgttcaacccttcaaaattgaaactctcaggctgagcggctgagcaagctctgagaatgtgggtcttcgaagactttcgcttgagcatggtgcatgtgcaaagagatggaatgtggaattgttgtaggtaggaacacagcccggtagagcggcgcagtggctcagcgaagctgggagaacgactgaaccggtcttgagattcatcatctcagcgtgcgtcagcgcgtcagcttcagcgtttgagaatggcacggactgacctgtcgtacatcccaaggaggcccgtgcgctatactcgccttgtggcctaatctgcgatcaacccatcctcaacgaaagcgcaagtagcgactaagcacactatctttcgggtcggtgcggtcacagtatcggcatctctgtctttagctacgatggtgtgcgtgtaactgatcagtacacccgctgtatcaaaactctatcttcaatccgctaagaatcgtcaccatcagtacatcagtacatcagtgggctaagatctaatggtgtcgttcgacggccgcgggcactagccacgagccaagagcggtacagttgctgcgaaatggtgggcagcctgacaggttcagtttgaataggatgaaaacgccatgaagaacagagaagctggcaattgacgatagtggggcgagcgcacgctgcttgctggtccgagcgtaggacgaacgacaaaccatgggcggggccaccaggccccagggagggcgtcactggttggatgtcgtctgttaggctagagctcaggcgctcagggcctctggcccaagcctcggacgcaagcctctgacgagcgagcgcgcgctggggcgggtctgcgcaggaacggcaggactgccgagttggttgaatattgaatggttggatgattggtttgctgggtttggttttgacacgcacggcacaggacaagtgagtttggaggttggatttgcgcaggtagaaagggcgctcggcctcagggcctcagcgtcagcagacgagctcgccagtccaggtcagtacccagtgttcgttacttcccaccgtccagagtttgctgctgcctctcagcttgattcgtgtcggagaagtagaaatggtcacagcgtaccacacactgtccccatgcctgcgtcctgctccacgagtgtttagccacaaaaatttatggacaaccttactgagcctgtgctggggggtgctttagcaccagcactggcgccatggcgtcaaggttaattccactgtcattcgacaaccttcaactgatgggggcaactgggcacaaaaccttggatatataaccaactccaactcccacggttttttaccttttgctcttctccccaggactcactacttctactcctctattcatcttcaccaaaatgtgagacctaatatcactgctgtacagacaagactgtgtatattaggtctcaatgaaggctctcaatttgtacggtatccaggacctccgctttgaggaaacacccgctccctctatcgaacatgatgacgatatcattatcaaagtcaaggctgtcggaatctgcggatccgatttgtcgcgttataagaaactgggaccttatgtccctggaatgacttttggacacgaattcgcgggagaggtcgtcaaaattggtcgttccgtgacgggattttctatcggtgatcgtgtcgctgcttgccctacttatacttgcggccagtgccgttactgtcaactcggcgagccgacacgatgtgagcgactgtctgtgatcggcgcacgccacccaggtgcatacgcagaatacgtcaaacttcccgcgaagcatgtcatccccttgcccaacgttgttaactatgacgaggccgccctcattgaaccggcttcggttgttgcgcacggcttttatcgtactaacattaagccaggtgcaagcgtcgctattatgggcgttggctcgatcggtctgctcgccgtccaatgggcaaaaatcttcggtgcgacaacggtctttgccattgatattgacgaacagaaacttaacgtcgctaatcaacttggagcagatgtcttgatctccagcctccaacgacccgcacacaagcaaatccttgaatataccaacggaatcggtgttgacgtggctgtggagtctgctggtacaccttctacctccgcccaggtgtttgcgctgccgaaaaaaggtggtgaagttgtctttcttggtattccttatgccgatgtccagattgaacgattttacttcgaaaaaattgttcgtaatgaactgcacgtttacggatcttggaatgcactctcctccccattcccgggtaaagagtgggccacgactatccattatatgtcgtccggacaattgaatgtcgcgcccatgatttcctaccgactccctctcgctaagggccccgagacgttccagcagatcgcaaagggtgaactcaagcccacaaaagtccttttctatcctgagaagttgtctgagcgcaagtaacacggatcaacaaaaatgtgcgccagctttgttgtgtgcccttttcctctagcggatcctatccacatttcgtgaatgaaccgattaagctctgacgagatttccttgttttctgtagatacctcttgtagaggtgtcaaagttatgttgtgatcgagagagttacctgcaaggtattatgcaagcggcttgatgaggacactcaactacgtgtgagtaggagtgcgttgctcagcagttgacgcgtgagccgcttgagcagcttgataaaggtcctaatcgtcttccagctgttggcagacgacaatgtgctgtagtagtaggataggcccgtaaaagtgtagaagcaataggttgagactgactgtaatgggtacttgcgttcaaagactgaaagtccaaaggattgctcaaaggcccctgaggtctgagcctctgagcgcgctcttcgtcaaaattcgccggggccatcggtcatcctctcgagggcagcatcttcctgcttgaagactgagtccgtctcagataacttcgtataatgtatgctatacgaagttatcctgcaggagctcagaccttgcatgttagccttgaccttgcctctatgaccactaattcgcacaagattgcacgttaccattgtcatcttgccatgtatccaatgtttcctgtttgccatagtacgtagtagatacatcgatcatcgatgcagatgacgcagatggcattggttcgctttgccctatgcatgcatcatgcatcatgcatcatgcgtcatgcgtcactatccatattaatcattgccctctgtactaggccatgacacctgcagacccttccccagggatgcttcttgtaatagccaatatactacacaactttaccgattacgatcgagatcgatctcactatagtttgtcgaacttcgatgcacatcgagggtgcggaaaaaagctgacggaagcggaagtgggtgaattggttaatttagttagattggcagggttgttcccaagattcaacgcaagctgagaaagaaaacagaaacacgaggcataaggccagtcagaaaatgcattacgaggggagttgaagtgactgtgggccagtgcctgggtcgtcatgtgcaaattttttcttcggttagactgccgcagcatgcagcaactctgccggccctatataactagtgcttcatcttcttgtcattcttgtctctttaccaacacaccggtactctttcaccatgggtaaggaaaagacacacgtatcgcgaccccgactcaactccaacatggacgcagacctgtacggatacaaatgggctcgagataatgtcggacagtcgggtgcgacgatctacagactctatggaaaaccggacgcccccgagctctttcttaaacacggcaagggtagcgttgcaaacgacgtaaccgacgaaatggtccgtctgaattggctaactgagttcatgccactccccaccatcaagcacttcatccgtacacctgacgatgcgtggctgttgactacggccatccccggtaagaccgcttttcaggtcctcgaggaataccctgactcgggcgagaacatcgtggatgccttggctgtgtttttgcgccgccttcactctattccggtctgcaactgccctttcaacagcgaccgtgtttttaggcttgcccaggcacaatcacgcatgaacaatggtctagtcgacgctagtgatttcgatgacgagcgcaacggctggccggtggaacaagtgtggaaagagatgcataagctcctgcccttttccccagactctgtcgtgacgcatggtgatttctcgcttgacaacctcatctttgacgagggcaagctcattggctgcattgacgtcggccgggttggcatcgccgatcgctaccaagatcttgcgatcctctggaattgtctgggcgagttctcccctagcctccagaagcgtctgttccagaaatatgggatcg

SEQ ID NO: 59 - DNA, 4636 bp, synthetic construct
  source 1..4636: mol_type = other DNA
tgcagagccttgcaaatgatgaaagaccaatggaattgatcattgattattgatgatgcatgatgaaagagatagaaacagatgcaagatgggatggcgcgatgatcaaatgataatgaacgttcaacccttcaaaattgaaactctcaggctgagcggctgagcaagctctgagaatgtgggtcttcgaagactttcgcttgagcatggtgcatgtgcaaagagatggaatgtggaattgttgtaggtaggaacacagcccggtagagcggcgcagtggctcagcgaagctgggagaacgactgaaccggtcttgagattcatcatctcagcgtgcgtcagcgcgtcagcttcagcgtttgagaatggcacggactgacctgtcgtacatcccaaggaggcccgtgcgctatactcgccttgtggcctaatctgcgatcaacccatcctcaacgaaagcgcaagtagcgactaagcacactatctttcgggtcggtgcggtcacagtatcggcatctctgtctttagctacgatggtgtgcgtgtaactgatcagtacacccgctgtatcaaaactctatcttcaatccgctaagaatcgtcaccatcagtacatcagtacatcagtgggctaagatctaatggtgtcgttcgacggccgcgggcactagccacgagccaagagcggtacagttgctgcgaaatggtgggcagcctgacaggttcagtttgaataggatgaaaacgccatgaagaacagagaagctggcaattgacgatagtggggcgagcgcacgctgcttgctggtccgagcgtaggacgaacgacaaaccatgggcggggccaccaggccccagggagggcgtcactggttggatgtcgtctgttaggctagagctcaggcgctcagggcctctggcccaagcctcggacgcaagcctctgacgagcgagcgcgcgctggggcgggtctgcgcaggaacggcaggactgccgagttggttgaatattgaatggttggatgattggtttgctgggtttggttttgacacgcacggcacaggacaagtgagtttggaggttggatttgcgcaggtagaaagggcgctcggcctcagggcctcagcgtcagcagacgagctcgccagtccaggtcagtacccagtgttcgttacttcccaccgtccagagtttgctgctgcctctcagcttgattcgtgtcggagaagtagaaatggtcacagcgtaccacacactgtccccatgcctgcgtcctgctccacgagtgtttagccacaaaaatttatggacaaccttactgagcctgtgctggggggtgctttagcaccagcactggcgccatggcgtcaaggttaattccactgtcattcgacaaccttcaactgatgggggcaactgggcacaaaaccttggatatataaccaactccaactcccacggttttttaccttttgctcttctccccaggactcactacttctactcctctattcatcttcaccaaaatgtgagacctaatatcactgctgtacagacaagactgtgtatattaggtctcaatgaaagtccttagcctgcataagcctggcgatattcgatttgaggacgctccaatgcctgagccaggagagggcgaagtgctgctgaaagttatggcatgcggcgtctgttcgtcggacgaggctcgaattttcaaggacggtgcccatattatgccaattgttcctggccacgagttctgtggccaagtggtgaaaacgggagcaggagtggacgaaagcctcatcggccgaaaagcgagcgtcttcccaatgcttccctgtttcgaatgcccttcttgtaaacgaggtgactacgcaacctgttctaactataaatactatggttcccgcaacgatggtggaatgggagaataccgagcaatcaaggcgtggaacctgaaccttctggatgattccgtcgattattgcgtcggcgcactgtccgagccatccgcggttggccatcacgccactgaagtgggaggagtgaaagccggagacaaggttttcgtcattggtagcggaaccatcggacttttgatcggcttcttcgctcaggctaagggtgcagaggtttggatcggtgcgcgtcgtaaagagagcaacgatttcgcggcgagcctgggttttaaaacgatcgacaccaataataccgaagacgaggttgcaaaggccacggatggtaacggcatggatgttgtcttcgaagcagttggtagcaataagtgtcttattgaagctattggatctgtcacggcgggaggcacacttgtcaccgtgggcaatcctgtgggagacatgaatcttccccgagatgtgtactggcgcatcctccgaaagcaactcacggtccgaggtacttggaactctagctactctgacaaggccaatgactggcacgaagtggccgcgttgatgaaagaaaaaaaaatcccgttcgaaaaactcatcacccgtaagtacaaactttctcaatgcgatgaggccttcgattttttccgtgaccactctattcagaagtcccgcgtgatgtttgttatgcacgaaaaagaatccgaagcttacaacggataacacggatcaacaaaaatgtgcgccagctttgttgtgtgcccttttcctctagcggatcctatccacatttcgtgaatgaaccgattaagctctgacgagatttccttgttttctgtagatacctcttgtagaggtgtcaaagttatgttgtgatcgagagagttacctgcaaggtattatgcaagcggcttgatgaggacactcaactacgtgtgagtaggagtgcgttgctcagcagttgacgcgtgagccgcttgagcagcttgataaaggtcctaatcgtcttccagctgttggcagacgacaatgtgctgtagtagtaggataggcccgtaaaagtgtagaagcaataggttgagactgactgtaatgggtacttgcgttcaaagactgaaagtccaaaggattgctcaaaggcccctgaggtctgagcctctgagcgcgctcttcgtcaaaattcgccggggccatcggtcatcctctcgagggcagcatcttcctgcttgaagactgagtccgtctcagataacttcgtataatgtatgctatacgaagttatcctgcaggagctcagaccttgcatgttagccttgaccttgcctctatgaccactaattcgcacaagattgcacgttaccattgtcatcttgccatgtatccaatgtttcctgtttgccatagtacgtagtagatacatcgatcatcgatgcagatgacgcagatggcattggttcgctttgccctatgcatgcatcatgcatcatgcatcatgcgtcatgcgtcactatccatattaatcattgccctctgtactaggccatgacacctgcagacccttccccagggatgcttcttgtaatagccaatatactacacaactttaccgattacgatcgagatcgatctcactatagtttgtcgaacttcgatgcacatcgagggtgcggaaaaaagctgacggaagcggaagtgggtgaattggttaatttagttagattggcagggttgttcccaagattcaacgcaagctgagaaagaaaacagaaacacgaggcataaggccagtcagaaaatgcattacgaggggagttgaagtgactgtgggccagtgcctgggtcgtcatgtgcaaattttttcttcggttagactgccgcagcatgcagcaactctgccggccctatataactagtgcttcatcttcttgtcattcttgtctctttaccaacacaccggtactctttcaccatgggtaaggaaaagacacacgtatcgcgaccccgactcaactccaacatggacgcagacctgtacggatacaaatgggctcgagataatgtcggacagtcgggtgcgacgatctacagactctatggaaaaccggacgcccccgagctctttcttaaacacggcaagggtagcgttgcaaacgacgtaaccgacgaaatggtccgtctgaattggctaactgagttcatgccactccccaccatcaagcacttcatccgtacacctgacgatgcgtggctgttgactacggccatccccggtaagaccgcttttcaggtcctcgaggaataccctgactcgggcgagaacatcgtggatgccttggctgtgtttttgcgccgccttcactctattccggtctgcaactgccctttcaacagcgaccgtgtttttaggcttgcccaggcacaatcacgcatgaacaatggtctagtcgacgctagtgatttcgatgacgagcgcaacggctggccggtggaacaagtgtggaaagagatgcataagctcctgcccttttccccagactctgtcgtgacgcatggtgatttctcgcttgacaacctcatctttgacgagggcaagctcattggctgcattgacgtcggccgggttggcatcgccgatcgctaccaagatcttgcgatcctctggaattgtctgggcgagttctcccctagcctccagaagcgtctgttccagaaatatgggatcg

SEQ ID NO: 60 - DNA, 4591 bp, synthetic construct
  source 1..4591: mol_type = other DNA
tgcagagccttgcaaatgatgaaagaccaatggaattgatcattgattattgatgatgcatgatgaaagagatagaaacagatgcaagatgggatggcgcgatgatcaaatgataatgaacgttcaacccttcaaaattgaaactctcaggctgagcggctgagcaagctctgagaatgtgggtcttcgaagactttcgcttgagcatggtgcatgtgcaaagagatggaatgtggaattgttgtaggtaggaacacagcccggtagagcggcgcagtggctcagcgaagctgggagaacgactgaaccggtcttgagattcatcatctcagcgtgcgtcagcgcgtcagcttcagcgtttgagaatggcacggactgacctgtcgtacatcccaaggaggcccgtgcgctatactcgccttgtggcctaatctgcgatcaacccatcctcaacgaaagcgcaagtagcgactaagcacactatctttcgggtcggtgcggtcacagtatcggcatctctgtctttagctacgatggtgtgcgtgtaactgatcagtacacccgctgtatcaaaactctatcttcaatccgctaagaatcgtcaccatcagtacatcagtacatcagtgggctaagatctaatggtgtcgttcgacggccgcgggcactagccacgagccaagagcggtacagttgctgcgaaatggtgggcagcctgacaggttcagtttgaataggatgaaaacgccatgaagaacagagaagctggcaattgacgatagtggggcgagcgcacgctgcttgctggtccgagcgtaggacgaacgacaaaccatgggcggggccaccaggccccagggagggcgtcactggttggatgtcgtctgttaggctagagctcaggcgctcagggcctctggcccaagcctcggacgcaagcctctgacgagcgagcgcgcgctggggcgggtctgcgcaggaacggcaggactgccgagttggttgaatattgaatggttggatgattggtttgctgggtttggttttgacacgcacggcacaggacaagtgagtttggaggttggatttgcgcaggtagaaagggcgctcggcctcagggcctcagcgtcagcagacgagctcgccagtccaggtcagtacccagtgttcgttacttcccaccgtccagagtttgctgctgcctctcagcttgattcgtgtcggagaagtagaaatggtcacagcgtaccacacactgtccccatgcctgcgtcctgctccacgagtgtttagccacaaaaatttatggacaaccttactgagcctgtgctggggggtgctttagcaccagcactggcgccatggcgtcaaggttaattccactgtcattcgacaaccttcaactgatgggggcaactgggcacaaaaccttggatatataaccaactccaactcccacggttttttaccttttgctcttctccccaggactcactacttctactcctctattcatcttcaccaaaatgtgagacctaatatcactgctgtacagacaagactgtgtatattaggtctcaatggtcaacatgatgaaagccctcgtgtttactgcgccccatacgttcgagtatcgtgacgttccccgacccgaacccgcccccgacgaggtcctggttgaggtgaaagcatgcgcaatttgtggttctgatgttcacggtagctcgggcgaaaacggtcgacgcattcctcccttggtgatgggccatgaggcaagcggcactatcgcacaattgggcgaagctgtgcagtcgtgggcagtgggagatcgcgttacatttgactctactgagtactgcggctactgttggttttgcacgcacggtatgcacaatttgtgcgcccagcgacgtatcgtgggcgttgcgtgcacagagtaccgtaaaaatggtgcaatggctcaatacattgcagtgaaagcccgtaccctttatgctttgccgccggcggtctcctttgaacagggttgccttgtcgaaccctttgctgtgggtatgcatgctgtcttgcgatctggactggcagcgggacagacggccgctgtgattggagatggaacaatcggtctgatgactcttattgcggccaagagccagggagcacaagtctgtatcagcggacaccacacccgtcccatgcagctcgcagcccagctcggagccctggattgtgcccaactgccccagctgacagctgagcgaggtgcggacgttgtttacgacgctgttggctctcaatccagctttacgcaagcgatggagcttgtccgtaagggaggccgaattatggttatcggcaatcatgcacgcacgatcgattttcctttgcaacgttgtatcacggaacagatcgacgttcagttttcgtacagctctgccggtgagtatcctgtttgtcttcaagccattgctgagggacgcgcagatttgacaggactgtggcaatctttcccactggctgagggcgctcaagttttcgaccgcctggttcaccgagatgagtccctgacgaaagccgttttgatcccataacacggatcaacaaaaatgtgcgccagctttgttgtgtgcccttttcctctagcggatcctatccacatttcgtgaatgaaccgattaagctctgacgagatttccttgttttctgtagatacctcttgtagaggtgtcaaagttatgttgtgatcgagagagttacctgcaaggtattatgcaagcggcttgatgaggacactcaactacgtgtgagtaggagtgcgttgctcagcagttgacgcgtgagccgcttgagcagcttgataaaggtcctaatcgtcttccagctgttggcagacgacaatgtgctgtagtagtaggataggcccgtaaaagtgtagaagcaataggttgagactgactgtaatgggtacttgcgttcaaagactgaaagtccaaaggattgctcaaaggcccctgaggtctgagcctctgagcgcgctcttcgtcaaaattcgccggggccatcggtcatcctctcgagggcagcatcttcctgcttgaagactgagtccgtctcagataacttcgtataatgtatgctatacgaagttatcctgcaggagctcagaccttgcatgttagccttgaccttgcctctatgaccactaattcgcacaagattgcacgttaccattgtcatcttgccatgtatccaatgtttcctgtttgccatagtacgtagtagatacatcgatcatcgatgcagatgacgcagatggcattggttcgctttgccctatgcatgcatcatgcatcatgcatcatgcgtcatgcgtcactatccatattaatcattgccctctgtactaggccatgacacctgcagacccttccccagggatgcttcttgtaatagccaatatactacacaactttaccgattacgatcgagatcgatctcactatagtttgtcgaacttcgatgcacatcgagggtgcggaaaaaagctgacggaagcggaagtgggtgaattggttaatttagttagattggcagggttgttcccaagattcaacgcaagctgagaaagaaaacagaaacacgaggcataaggccagtcagaaaatgcattacgaggggagttgaagtgactgtgggccagtgcctgggtcgtcatgtgcaaattttttcttcggttagactgccgcagcatgcagcaactctgccggccctatataactagtgcttcatcttcttgtcattcttgtctctttaccaacacaccggtactctttcaccatgggtaaggaaaagacacacgtatcgcgaccccgactcaactccaacatggacgcagacctgtacggatacaaatgggctcgagataatgtcggacagtcgggtgcgacgatctacagactctatggaaaaccggacgcccccgagctctttcttaaacacggcaagggtagcgttgcaaacgacgtaaccgacgaaatggtccgtctgaattggctaactgagttcatgccactccccaccatcaagcacttcatccgtacacctgacgatgcgtggctgttgactacggccatccccggtaagaccgcttttcaggtcctcgaggaataccctgactcgggcgagaacatcgtggatgccttggctgtgtttttgcgccgccttcactctattccggtctgcaactgccctttcaacagcgaccgtgtttttaggcttgcccaggcacaatcacgcatgaacaatggtctagtcgacgctagtgatttcgatgacgagcgcaacggctggccggtggaacaagtgtggaaagagatgcataagctcctgcccttttccccagactctgtcgtgacgcatggtgatttctcgcttgacaacctcatctttgacgagggcaagctcattggctgcattgacgtcggccgggttggcatcgccgatcgctaccaagatcttgcgatcctctggaattgtctgggcgagttctcccctagcctccagaagcgtctgttccagaaatatgggatcg

SEQ ID NO: 61 - DNA, 4654 bp, synthetic construct
  misc_feature 1..4654: note = synthetic
  source 1..4654: mol_type = other DNA
tgcagagccttgcaaatgatgaaagaccaatggaattgatcattgattattgatgatgcatgatgaaagagatagaaacagatgcaagatgggatggcgcgatgatcaaatgataatgaacgttcaacccttcaaaattgaaactctcaggctgagcggctgagcaagctctgagaatgtgggtcttcgaagactttcgcttgagcatggtgcatgtgcaaagagatggaatgtggaattgttgtaggtaggaacacagcccggtagagcggcgcagtggctcagcgaagctgggagaacgactgaaccggtcttgagattcatcatctcagcgtgcgtcagcgcgtcagcttcagcgtttgagaatggcacggactgacctgtcgtacatcccaaggaggcccgtgcgctatactcgccttgtggcctaatctgcgatcaacccatcctcaacgaaagcgcaagtagcgactaagcacactatctttcgggtcggtgcggtcacagtatcggcatctctgtctttagctacgatggtgtgcgtgtaactgatcagtacacccgctgtatcaaaactctatcttcaatccgctaagaatcgtcaccatcagtacatcagtacatcagtgggctaagatctaatggtgtcgttcgacggccgcgggcactagccacgagccaagagcggtacagttgctgcgaaatggtgggcagcctgacaggttcagtttgaataggatgaaaacgccatgaagaacagagaagctggcaattgacgatagtggggcgagcgcacgctgcttgctggtccgagcgtaggacgaacgacaaaccatgggcggggccaccaggccccagggagggcgtcactggttggatgtcgtctgttaggctagagctcaggcgctcagggcctctggcccaagcctcggacgcaagcctctgacgagcgagcgcgcgctggggcgggtctgcgcaggaacggcaggactgccgagttggttgaatattgaatggttggatgattggtttgctgggtttggttttgacacgcacggcacaggacaagtgagtttggaggttggatttgcgcaggtagaaagggcgctcggcctcagggcctcagcgtcagcagacgagctcgccagtccaggtcagtacccagtgttcgttacttcccaccgtccagagtttgctgctgcctctcagcttgattcgtgtcggagaagtagaaatggtcacagcgtaccacacactgtccccatgcctgcgtcctgctccacgagtgtttagccacaaaaatttatggacaaccttactgagcctgtgctggggggtgctttagcaccagcactggcgccatggcgtcaaggttaattccactgtcattcgacaaccttcaactgatgggggcaactgggcacaaaaccttggatatataaccaactccaactcccacggttttttaccttttgctcttctccccaggactcactacttctactcctctattcatcttcaccaaaatgtgagacctaatatcactgctgtacagacaagactgtgtatattaggtctcaatgaaggcctatgttttggatggtattggccagctgaatcaacatgagtatgtcctccgagacttgcagcctggagaagccctcgttcaagtggctgcggctggtatctgcggtagcgacctgccccgcatctttgagactggaacttatcattttccaactatcccaggccatgaattcgcaggtgttgtcaaagaactttatgctgatgccgacgaagaaatgctccgacaatggatgggtaagcgcgttgcggtgtttccactgattccctgtcgaacctgtcgaagctgcgcgaatcatcagtacgagatgtgttctaactataattacctcggctcgcgtacggacggaggcttcgctgaatactgtatcgtgcctgtttggaacttgttgcagttgccggacgaggttagcttcgcacaggccgctatgatggaaccggcagctgtggcattgcatgcaatccgacgtggcggcctgcaccccgaccaccccgagaccggtatcggcaagcgtgttctggttatgggacttggcactattggcggattgatcgcccagtggcttagccaatgtggcgttacggagctcaccgccactggtcaccacgccccccaggaagagcttatgcaccgatatgctaacgagaactaccgattcattaatactaatcaaactgcttggaccgatgacgaaaacacctacgatcttatttttgactgcattaatgacagcgaatccgttcagcaggcgttgcgctacgtcaaacccggtggtcagattgttgctgttggcaacccgaaaaaagatcttactcttcaaaaggacatctattggaaactcctgcgaaaacaagtgtgtatgaccggaacatggaactcgagcttcagccatgattcgaacgatgactggcagatcctccttcgataccttcaggagcaaaagctgcatccgcaggcacttatcacacatcgccttccgtttgcccaacttcccaagggcttggagatcatgcgtcttcgtgaagagttttacaacaaaattatgatcgacttgactgtctgttcttaacacggatcaacaaaaatgtgcgccagctttgttgtgtgcccttttcctctagcggatcctatccacatttcgtgaatgaaccgattaagctctgacgagatttccttgttttctgtagatacctcttgtagaggtgtcaaagttatgttgtgatcgagagagttacctgcaaggtattatgcaagcggcttgatgaggacactcaactacgtgtgagtaggagtgcgttgctcagcagttgacgcgtgagccgcttgagcagcttgataaaggtcctaatcgtcttccagctgttggcagacgacaatgtgctgtagtagtaggataggcccgtaaaagtgtagaagcaataggttgagactgactgtaatgggtacttgcgttcaaagactgaaagtccaaaggattgctcaaaggcccctgaggtctgagcctctgagcgcgctcttcgtcaaaattcgccggggccatcggtcatcctctcgagggcagcatcttcctgcttgaagactgagtccgtctcagataacttcgtataatgtatgctatacgaagttatcctgcaggagctcagaccttgcatgttagccttgaccttgcctctatgaccactaattcgcacaagattgcacgttaccattgtcatcttgccatgtatccaatgtttcctgtttgccatagtacgtagtagatacatcgatcatcgatgcagatgacgcagatggcattggttcgctttgccctatgcatgcatcatgcatcatgcatcatgcgtcatgcgtcactatccatattaatcattgccctctgtactaggccatgacacctgcagacccttccccagggatgcttcttgtaatagccaatatactacacaactttaccgattacgatcgagatcgatctcactatagtttgtcgaacttcgatgcacatcgagggtgcggaaaaaagctgacggaagcggaagtgggtgaattggttaatttagttagattggcagggttgttcccaagattcaacgcaagctgagaaagaaaacagaaacacgaggcataaggccagtcagaaaatgcattacgaggggagttgaagtgactgtgggccagtgcctgggtcgtcatgtgcaaattttttcttcggttagactgccgcagcatgcagcaactctgccggccctatataactagtgcttcatcttcttgtcattcttgtctctttaccaacacaccggtactctttcaccatgggtaaggaaaagacacacgtatcgcgaccccgactcaactccaacatggacgcagacctgtacggatacaaatgggctcgagataatgtcggacagtcgggtgcgacgatctacagactctatggaaaaccggacgcccccgagctctttcttaaacacggcaagggtagcgttgcaaacgacgtaaccgacgaaatggtccgtctgaattggctaactgagttcatgccactccccaccatcaagcacttcatccgtacacctgacgatgcgtggctgttgactacggccatccccggtaagaccgcttttcaggtcctcgaggaataccctgactcgggcgagaacatcgtggatgccttggctgtgtttttgcgccgccttcactctattccggtctgcaactgccctttcaacagcgaccgtgtttttaggcttgcccaggcacaatcacgcatgaacaatggtctagtcgacgctagtgatttcgatgacgagcgcaacggctggccggtggaacaagtgtggaaagagatgcataagctcctgcccttttccccagactctgtcgtgacgcatggtgatttctcgcttgacaacctcatctttgacgagggcaagctcattggctgcattgacgtcggccgggttggcatcgccgatcgctaccaagatcttgcgatcctctggaattgtctgggcgagttctcccctagcctccagaagcgtctgttccagaaatatgggatcg

SEQ ID NO: 62 - DNA, 4609 bp, synthetic construct
  source 1..4609: mol_type = other DNA
tgcagagccttgcaaatgatgaaagaccaatggaattgatcattgattattgatgatgcatgatgaaagagatagaaacagatgcaagatgggatggcgcgatgatcaaatgataatgaacgttcaacccttcaaaattgaaactctcaggctgagcggctgagcaagctctgagaatgtgggtcttcgaagactttcgcttgagcatggtgcatgtgcaaagagatggaatgtggaattgttgtaggtaggaacacagcccggtagagcggcgcagtggctcagcgaagctgggagaacgactgaaccggtcttgagattcatcatctcagcgtgcgtcagcgcgtcagcttcagcgtttgagaatggcacggactgacctgtcgtacatcccaaggaggcccgtgcgctatactcgccttgtggcctaatctgcgatcaacccatcctcaacgaaagcgcaagtagcgactaagcacactatctttcgggtcggtgcggtcacagtatcggcatctctgtctttagctacgatggtgtgcgtgtaactgatcagtacacccgctgtatcaaaactctatcttcaatccgctaagaatcgtcaccatcagtacatcagtacatcagtgggctaagatctaatggtgtcgttcgacggccgcgggcactagccacgagccaagagcggtacagttgctgcgaaatggtgggcagcctgacaggttcagtttgaataggatgaaaacgccatgaagaacagagaagctggcaattgacgatagtggggcgagcgcacgctgcttgctggtccgagcgtaggacgaacgacaaaccatgggcggggccaccaggccccagggagggcgtcactggttggatgtcgtctgttaggctagagctcaggcgctcagggcctctggcccaagcctcggacgcaagcctctgacgagcgagcgcgcgctggggcgggtctgcgcaggaacggcaggactgccgagttggttgaatattgaatggttggatgattggtttgctgggtttggttttgacacgcacggcacaggacaagtgagtttggaggttggatttgcgcaggtagaaagggcgctcggcctcagggcctcagcgtcagcagacgagctcgccagtccaggtcagtacccagtgttcgttacttcccaccgtccagagtttgctgctgcctctcagcttgattcgtgtcggagaagtagaaatggtcacagcgtaccacacactgtccccatgcctgcgtcctgctccacgagtgtttagccacaaaaatttatggacaaccttactgagcctgtgctggggggtgctttagcaccagcactggcgccatggcgtcaaggttaattccactgtcattcgacaaccttcaactgatgggggcaactgggcacaaaaccttggatatataaccaactccaactcccacggttttttaccttttgctcttctccccaggactcactacttctactcctctattcatcttcaccaaaatgtgagacctaatatcactgctgtacagacaagactgtgtatattaggtctcaatgaaggccgtgacttacactcccgaccagggttttgcattggtcgaggttgagacaccccagcttggacctgacgaagttcttctccaggtggaggcttgtggcgtctgcggaagcgaccgtcaagtcgttgcaggcgaatcggttcctaccggtaccgccttccctctggtgatgggccacgagattgccggacgtatcgccgcgttgggcgaaactgtgacagattggcatgttggagactctgtgattgtccatcccttcgtggcatgtggtacgtgcgcaccctgtgttcacggccagcctaacttgtgcgtccgacaggtgtgtattggttatcaacgacctggaggatttgcagagcaagttgctgtcccggctcgtcaactggttcgacgtccagcagaattggcaccggccgccgcagcattggttgtggatgcgtttgccacgccataccacgcgatgcgagcggcgggtgttgagagcggccaaaccgttttgattattggaaccggcggacttggtctcgcggcacttatgctggccatgggcttccatgtcggccgtctgggcgcggtcacgcgacgccaagagggtattgcaatcgcggaggctcatggcgcgcagatggttgtcgtcacggaccaggatgagcgtacaattgcgcgccagcttcgccgctggtctggcgcatccggcattgacgtcgtcatcgatacggtcgctactgctgacactattacattggcagctgaaagcgttcgcccaggaggcactatcgctattgtcggaatgtcggccgacaccgccctctatcctgtcgctaagaccgttcgccgaggtctgacattcgttgcgagctacggatccgtccgagaggatgtcgagcagttggtcagctgggtggcagaaggtcgactggacccggttcgactcgtcgcgggagccctcccactccatgaagccgctcgtgcattcgccccggaccgacccgccggacgttgggttattgatccatctgaataacacggatcaacaaaaatgtgcgccagctttgttgtgtgcccttttcctctagcggatcctatccacatttcgtgaatgaaccgattaagctctgacgagatttccttgttttctgtagatacctcttgtagaggtgtcaaagttatgttgtgatcgagagagttacctgcaaggtattatgcaagcggcttgatgaggacactcaactacgtgtgagtaggagtgcgttgctcagcagttgacgcgtgagccgcttgagcagcttgataaaggtcctaatcgtcttccagctgttggcagacgacaatgtgctgtagtagtaggataggcccgtaaaagtgtagaagcaataggttgagactgactgtaatgggtacttgcgttcaaagactgaaagtccaaaggattgctcaaaggcccctgaggtctgagcctctgagcgcgctcttcgtcaaaattcgccggggccatcggtcatcctctcgagggcagcatcttcctgcttgaagactgagtccgtctcagataacttcgtataatgtatgctatacgaagttatcctgcaggagctcagaccttgcatgttagccttgaccttgcctctatgaccactaattcgcacaagattgcacgttaccattgtcatcttgccatgtatccaatgtttcctgtttgccatagtacgtagtagatacatcgatcatcgatgcagatgacgcagatggcattggttcgctttgccctatgcatgcatcatgcatcatgcatcatgcgtcatgcgtcactatccatattaatcattgccctctgtactaggccatgacacctgcagacccttccccagggatgcttcttgtaatagccaatatactacacaactttaccgattacgatcgagatcgatctcactatagtttgtcgaacttcgatgcacatcgagggtgcggaaaaaagctgacggaagcggaagtgggtgaattggttaatttagttagattggcagggttgttcccaagattcaacgcaagctgagaaagaaaacagaaacacgaggcataaggccagtcagaaaatgcattacgaggggagttgaagtgactgtgggccagtgcctgggtcgtcatgtgcaaattttttcttcggttagactgccgcagcatgcagcaactctgccggccctatataactagtgcttcatcttcttgtcattcttgtctctttaccaacacaccggtactctttcaccatgggtaaggaaaagacacacgtatcgcgaccccgactcaactccaacatggacgcagacctgtacggatacaaatgggctcgagataatgtcggacagtcgggtgcgacgatctacagactctatggaaaaccggacgcccccgagctctttcttaaacacggcaagggtagcgttgcaaacgacgtaaccgacgaaatggtccgtctgaattggctaactgagttcatgccactccccaccatcaagcacttcatccgtacacctgacgatgcgtggctgttgactacggccatccccggtaagaccgcttttcaggtcctcgaggaataccctgactcgggcgagaacatcgtggatgccttggctgtgtttttgcgccgccttcactctattccggtctgcaactgccctttcaacagcgaccgtgtttttaggcttgcccaggcacaatcacgcatgaacaatggtctagtcgacgctagtgatttcgatgacgagcgcaacggctggccggtggaacaagtgtggaaagagatgcataagctcctgcccttttccccagactctgtcgtgacgcatggtgatttctcgcttgacaacctcatctttgacgagggcaagctcattggctgcattgacgtcggccgggttggcatcgccgatcgctaccaagatcttgcgatcctctggaattgtctgggcgagttctcccctagcctccagaagcgtctgttccagaaatatgggatcg

SEQ ID NO: 63 - DNA, 4654 bp, synthetic construct
  source 1..4654: mol_type = other DNA
tgcagagccttgcaaatgatgaaagaccaatggaattgatcattgattattgatgatgcatgatgaaagagatagaaacagatgcaagatgggatggcgcgatgatcaaatgataatgaacgttcaacccttcaaaattgaaactctcaggctgagcggctgagcaagctctgagaatgtgggtcttcgaagactttcgcttgagcatggtgcatgtgcaaagagatggaatgtggaattgttgtaggtaggaacacagcccggtagagcggcgcagtggctcagcgaagctgggagaacgactgaaccggtcttgagattcatcatctcagcgtgcgtcagcgcgtcagcttcagcgtttgagaatggcacggactgacctgtcgtacatcccaaggaggcccgtgcgctatactcgccttgtggcctaatctgcgatcaacccatcctcaacgaaagcgcaagtagcgactaagcacactatctttcgggtcggtgcggtcacagtatcggcatctctgtctttagctacgatggtgtgcgtgtaactgatcagtacacccgctgtatcaaaactctatcttcaatccgctaagaatcgtcaccatcagtacatcagtacatcagtgggctaagatctaatggtgtcgttcgacggccgcgggcactagccacgagccaagagcggtacagttgctgcgaaatggtgggcagcctgacaggttcagtttgaataggatgaaaacgccatgaagaacagagaagctggcaattgacgatagtggggcgagcgcacgctgcttgctggtccgagcgtaggacgaacgacaaaccatgggcggggccaccaggccccagggagggcgtcactggttggatgtcgtctgttaggctagagctcaggcgctcagggcctctggcccaagcctcggacgcaagcctctgacgagcgagcgcgcgctggggcgggtctgcgcaggaacggcaggactgccgagttggttgaatattgaatggttggatgattggtttgctgggtttggttttgacacgcacggcacaggacaagtgagtttggaggttggatttgcgcaggtagaaagggcgctcggcctcagggcctcagcgtcagcagacgagctcgccagtccaggtcagtacccagtgttcgttacttcccaccgtccagagtttgctgctgcctctcagcttgattcgtgtcggagaagtagaaatggtcacagcgtaccacacactgtccccatgcctgcgtcctgctccacgagtgtttagccacaaaaatttatggacaaccttactgagcctgtgctggggggtgctttagcaccagcactggcgccatggcgtcaaggttaattccactgtcattcgacaaccttcaactgatgggggcaactgggcacaaaaccttggatatataaccaactccaactcccacggttttttaccttttgctcttctccccaggactcactacttctactcctctattcatcttcaccaaaatgtgagacctaatatcactgctgtacagacaagactgtgtatattaggtctcaatgaaaagcttgattaatatcccggaaaaaatgaaagccctcgttttgtatggtgttggtgatttgcgtgtcactgaagtggacgttccgaagctcgaaaaaggaacggtcctccttaaaattaaagcttgcggcatctgttcctccgacatgcctcgttgtttcgttactggcacttaccattttccgaccattccaggacacgagttctctggacaaatcgttgcggtgggtgatgatgttgatgaatccttgttgggaaagcgttcgtgcgttttccctatgcttccctgcaaacactgcaaagcttgcaagatggaggaatatgctcagtgtagcggctattcttacttcggctctcgccaagatggtgcctgggcggaatacctcgtggtcccggtgtggaacctggtgccctttgacgatacactcgattataaaactgcagccctgtgcgaaccagctgcggtctctatgcacgccgttaatattggagacattaaagaaggtcagaatgttgtgatcatcggaacgggtaccatcggattcatgattgctctctttgccaaagaacgtacgaaaacaggaaaggttgtgatcgcgggacgctcgaaaaataagctggaatacgcgaaaaagttgggcttcgatgtcgttgacacctcggttgacgatttgcctgcccaagtgaagaaaatcatcggtattgatggagctgacgtcacattcgaagcggtcggctccaatgaggccattgcctctgctattgaatctacgggcgctttgggttcgattgttcttgtcggtaatccttccactgatctcatcttgccaaagaatatttattggtccatcctccgaaagcaaattacagttaaaggttcctggaactcgtcttataactctcgcgttaatgactggaagaaagcgttggaggtgtttgagcatagcgacgtgaattttgcagacttgatcacacacacattcactatcgaagaaaacgagaaagctttttctgccatccgtaacactggagaattcactctcaaagtcatgtttaccttcgatgattaacacggatcaacaaaaatgtgcgccagctttgttgtgtgcccttttcctctagcggatcctatccacatttcgtgaatgaaccgattaagctctgacgagatttccttgttttctgtagatacctcttgtagaggtgtcaaagttatgttgtgatcgagagagttacctgcaaggtattatgcaagcggcttgatgaggacactcaactacgtgtgagtaggagtgcgttgctcagcagttgacgcgtgagccgcttgagcagcttgataaaggtcctaatcgtcttccagctgttggcagacgacaatgtgctgtagtagtaggataggcccgtaaaagtgtagaagcaataggttgagactgactgtaatgggtacttgcgttcaaagactgaaagtccaaaggattgctcaaaggcccctgaggtctgagcctctgagcgcgctcttcgtcaaaattcgccggggccatcggtcatcctctcgagggcagcatcttcctgcttgaagactgagtccgtctcagataacttcgtataatgtatgctatacgaagttatcctgcaggagctcagaccttgcatgttagccttgaccttgcctctatgaccactaattcgcacaagattgcacgttaccattgtcatcttgccatgtatccaatgtttcctgtttgccatagtacgtagtagatacatcgatcatcgatgcagatgacgcagatggcattggttcgctttgccctatgcatgcatcatgcatcatgcatcatgcgtcatgcgtcactatccatattaatcattgccctctgtactaggccatgacacctgcagacccttccccagggatgcttcttgtaatagccaatatactacacaactttaccgattacgatcgagatcgatctcactatagtttgtcgaacttcgatgcacatcgagggtgcggaaaaaagctgacggaagcggaagtgggtgaattggttaatttagttagattggcagggttgttcccaagattcaacgcaagctgagaaagaaaacagaaacacgaggcataaggccagtcagaaaatgcattacgaggggagttgaagtgactgtgggccagtgcctgggtcgtcatgtgcaaattttttcttcggttagactgccgcagcatgcagcaactctgccggccctatataactagtgcttcatcttcttgtcattcttgtctctttaccaacacaccggtactctttcaccatgggtaaggaaaagacacacgtatcgcgaccccgactcaactccaacatggacgcagacctgtacggatacaaatgggctcgagataatgtcggacagtcgggtgcgacgatctacagactctatggaaaaccggacgcccccgagctctttcttaaacacggcaagggtagcgttgcaaacgacgtaaccgacgaaatggtccgtctgaattggctaactgagttcatgccactccccaccatcaagcacttcatccgtacacctgacgatgcgtggctgttgactacggccatccccggtaagaccgcttttcaggtcctcgaggaataccctgactcgggcgagaacatcgtggatgccttggctgtgtttttgcgccgccttcactctattccggtctgcaactgccctttcaacagcgaccgtgtttttaggcttgcccaggcacaatcacgcatgaacaatggtctagtcgacgctagtgatttcgatgacgagcgcaacggctggccggtggaacaagtgtggaaagagatgcataagctcctgcccttttccccagactctgtcgtgacgcatggtgatttctcgcttgacaacctcatctttgacgagggcaagctcattggctgcattgacgtcggccgggttggcatcgccgatcgctaccaagatcttgcgatcctctggaattgtctgggcgagttctcccctagcctccagaagcgtctgttccagaaatatgggatcg

SEQ ID NO: 64 - DNA, 4627 bp, synthetic construct
  source 1..4627: mol_type = other DNA
tgcagagccttgcaaatgatgaaagaccaatggaattgatcattgattattgatgatgcatgatgaaagagatagaaacagatgcaagatgggatggcgcgatgatcaaatgataatgaacgttcaacccttcaaaattgaaactctcaggctgagcggctgagcaagctctgagaatgtgggtcttcgaagactttcgcttgagcatggtgcatgtgcaaagagatggaatgtggaattgttgtaggtaggaacacagcccggtagagcggcgcagtggctcagcgaagctgggagaacgactgaaccggtcttgagattcatcatctcagcgtgcgtcagcgcgtcagcttcagcgtttgagaatggcacggactgacctgtcgtacatcccaaggaggcccgtgcgctatactcgccttgtggcctaatctgcgatcaacccatcctcaacgaaagcgcaagtagcgactaagcacactatctttcgggtcggtgcggtcacagtatcggcatctctgtctttagctacgatggtgtgcgtgtaactgatcagtacacccgctgtatcaaaactctatcttcaatccgctaagaatcgtcaccatcagtacatcagtacatcagtgggctaagatctaatggtgtcgttcgacggccgcgggcactagccacgagccaagagcggtacagttgctgcgaaatggtgggcagcctgacaggttcagtttgaataggatgaaaacgccatgaagaacagagaagctggcaattgacgatagtggggcgagcgcacgctgcttgctggtccgagcgtaggacgaacgacaaaccatgggcggggccaccaggccccagggagggcgtcactggttggatgtcgtctgttaggctagagctcaggcgctcagggcctctggcccaagcctcggacgcaagcctctgacgagcgagcgcgcgctggggcgggtctgcgcaggaacggcaggactgccgagttggttgaatattgaatggttggatgattggtttgctgggtttggttttgacacgcacggcacaggacaagtgagtttggaggttggatttgcgcaggtagaaagggcgctcggcctcagggcctcagcgtcagcagacgagctcgccagtccaggtcagtacccagtgttcgttacttcccaccgtccagagtttgctgctgcctctcagcttgattcgtgtcggagaagtagaaatggtcacagcgtaccacacactgtccccatgcctgcgtcctgctccacgagtgtttagccacaaaaatttatggacaaccttactgagcctgtgctggggggtgctttagcaccagcactggcgccatggcgtcaaggttaattccactgtcattcgacaaccttcaactgatgggggcaactgggcacaaaaccttggatatataaccaactccaactcccacggttttttaccttttgctcttctccccaggactcactacttctactcctctattcatcttcaccaaaatgtgagacctaatatcactgctgtacagacaagactgtgtatattaggtctcaatgaaagctgtcgtcctgcatggtaaaaacgacatttgctatgaagaatggcctgaacccatcctgaaaacaggaacagttaagattcatgtcaaggcttgtggcatttgcggctctgacattcctcgcgttctcggagattctgcccattactacccgatcatcctcggccatgagttctccggttgtgtcactgaggtggctgatgacgttgacaagatccaggttggcgatcatgttgcaggagtcccccttctcccgtgcatgaaatgcgatgattgtcaacagggaaactattctcagtgtaaacattactcttttatcggcagccgcgagcaaggtggatttgcagattatgttgtgatcccagccgataacgtggttaaagtcgacccaactcttccttacgaacaggtcgcactcttcgagccttgtactgttgctttgcatgcactcaaagtctcctcgtataaaggaggaaaacgagtggcgatcctgggtggcggcacgattggtctttttgcactccagtgggctaaaatctatggcgcgtcccaagtcacagtcttcggtcgcagcaaggaacacttgaagatcgctgctgctctgggtgccgacacaactatttccactctggacgataattttatgacagaggctatgcgagtcacagagaaaaagggttttgactacatttacgagtccgccggttccacaatcaccatgaagcttgcttttgaactggcagccaaccacgcgaaaatctgtttcattggcacgcccacggaaaacctgactttcagccctaagctgtgggagaacatgaatcgaaaggagttccagcttatgggttcctggatgtcgtgttcggcgccgttccccggcgatgaatggaaggagacagcccatttctttaacaccggacaacttcgatatgtgcctgagatgtttttcgcacagtatcccatggacgatgttaaaaaagcgttcgagcagttccataacaagaataaagttaagggacgtatcctgctcaaaaacaagtaacacggatcaacaaaaatgtgcgccagctttgttgtgtgcccttttcctctagcggatcctatccacatttcgtgaatgaaccgattaagctctgacgagatttccttgttttctgtagatacctcttgtagaggtgtcaaagttatgttgtgatcgagagagttacctgcaaggtattatgcaagcggcttgatgaggacactcaactacgtgtgagtaggagtgcgttgctcagcagttgacgcgtgagccgcttgagcagcttgataaaggtcctaatcgtcttccagctgttggcagacgacaatgtgctgtagtagtaggataggcccgtaaaagtgtagaagcaataggttgagactgactgtaatgggtacttgcgttcaaagactgaaagtccaaaggattgctcaaaggcccctgaggtctgagcctctgagcgcgctcttcgtcaaaattcgccggggccatcggtcatcctctcgagggcagcatcttcctgcttgaagactgagtccgtctcagataacttcgtataatgtatgctatacgaagttatcctgcaggagctcagaccttgcatgttagccttgaccttgcctctatgaccactaattcgcacaagattgcacgttaccattgtcatcttgccatgtatccaatgtttcctgtttgccatagtacgtagtagatacatcgatcatcgatgcagatgacgcagatggcattggttcgctttgccctatgcatgcatcatgcatcatgcatcatgcgtcatgcgtcactatccatattaatcattgccctctgtactaggccatgacacctgcagacccttccccagggatgcttcttgtaatagccaatatactacacaactttaccgattacgatcgagatcgatctcactatagtttgtcgaacttcgatgcacatcgagggtgcggaaaaaagctgacggaagcggaagtgggtgaattggttaatttagttagattggcagggttgttcccaagattcaacgcaagctgagaaagaaaacagaaacacgaggcataaggccagtcagaaaatgcattacgaggggagttgaagtgactgtgggccagtgcctgggtcgtcatgtgcaaattttttcttcggttagactgccgcagcatgcagcaactctgccggccctatataactagtgcttcatcttcttgtcattcttgtctctttaccaacacaccggtactctttcaccatgggtaaggaaaagacacacgtatcgcgaccccgactcaactccaacatggacgcagacctgtacggatacaaatgggctcgagataatgtcggacagtcgggtgcgacgatctacagactctatggaaaaccggacgcccccgagctctttcttaaacacggcaagggtagcgttgcaaacgacgtaaccgacgaaatggtccgtctgaattggctaactgagttcatgccactccccaccatcaagcacttcatccgtacacctgacgatgcgtggctgttgactacggccatccccggtaagaccgcttttcaggtcctcgaggaataccctgactcgggcgagaacatcgtggatgccttggctgtgtttttgcgccgccttcactctattccggtctgcaactgccctttcaacagcgaccgtgtttttaggcttgcccaggcacaatcacgcatgaacaatggtctagtcgacgctagtgatttcgatgacgagcgcaacggctggccggtggaacaagtgtggaaagagatgcataagctcctgcccttttccccagactctgtcgtgacgcatggtgatttctcgcttgacaacctcatctttgacgagggcaagctcattggctgcattgacgtcggccgggttggcatcgccgatcgctaccaagatcttgcgatcctctggaattgtctgggcgagttctcccctagcctccagaagcgtctgttccagaaatatgggatcg

SEQ ID NO: 65 - DNA, 4594 bp, synthetic construct
  source 1..4594: mol_type = other DNA
tgcagagccttgcaaatgatgaaagaccaatggaattgatcattgattattgatgatgcatgatgaaagagatagaaacagatgcaagatgggatggcgcgatgatcaaatgataatgaacgttcaacccttcaaaattgaaactctcaggctgagcggctgagcaagctctgagaatgtgggtcttcgaagactttcgcttgagcatggtgcatgtgcaaagagatggaatgtggaattgttgtaggtaggaacacagcccggtagagcggcgcagtggctcagcgaagctgggagaacgactgaaccggtcttgagattcatcatctcagcgtgcgtcagcgcgtcagcttcagcgtttgagaatggcacggactgacctgtcgtacatcccaaggaggcccgtgcgctatactcgccttgtggcctaatctgcgatcaacccatcctcaacgaaagcgcaagtagcgactaagcacactatctttcgggtcggtgcggtcacagtatcggcatctctgtctttagctacgatggtgtgcgtgtaactgatcagtacacccgctgtatcaaaactctatcttcaatccgctaagaatcgtcaccatcagtacatcagtacatcagtgggctaagatctaatggtgtcgttcgacggccgcgggcactagccacgagccaagagcggtacagttgctgcgaaatggtgggcagcctgacaggttcagtttgaataggatgaaaacgccatgaagaacagagaagctggcaattgacgatagtggggcgagcgcacgctgcttgctggtccgagcgtaggacgaacgacaaaccatgggcggggccaccaggccccagggagggcgtcactggttggatgtcgtctgttaggctagagctcaggcgctcagggcctctggcccaagcctcggacgcaagcctctgacgagcgagcgcgcgctggggcgggtctgcgcaggaacggcaggactgccgagttggttgaatattgaatggttggatgattggtttgctgggtttggttttgacacgcacggcacaggacaagtgagtttggaggttggatttgcgcaggtagaaagggcgctcggcctcagggcctcagcgtcagcagacgagctcgccagtccaggtcagtacccagtgttcgttacttcccaccgtccagagtttgctgctgcctctcagcttgattcgtgtcggagaagtagaaatggtcacagcgtaccacacactgtccccatgcctgcgtcctgctccacgagtgtttagccacaaaaatttatggacaaccttactgagcctgtgctggggggtgctttagcaccagcactggcgccatggcgtcaaggttaattccactgtcattcgacaaccttcaactgatgggggcaactgggcacaaaaccttggatatataaccaactccaactcccacggttttttaccttttgctcttctccccaggactcactacttctactcctctattcatcttcaccaaaatgtgagacctaatatcactgctgtacagacaagactgtgtatattaggtctcaatgaaagtggcggtttggtatggtgacaaaaatattgtcttggaggaccgtccgatcccttctatcggtgaaaaggacgtcttggtccgtgtcaagtcgtcttccatctgcggagctgaccttcatgcctacaaaggcctctctaagcgccgcaagcctccattggtgatgggacatgaattttccggtatggttgaacgcctcggcgatgagacaaagggccttaaggtcggcgatcgtgtcgtggtggagcccattattagctgcggaaagtgcaaggcatgcaaaaagggaaaaacgaatgtctgcgaaaatcgtaagctgatcggtctgaacctcgacggtgctttcgctgaatatgtttctgtcccttatgaaaagtgccatgaactcccccgtgacctttcgttcgatgagggtgcgattatcgagccgttggccgtcgccgttcatgcggtcaatattactcccatctcgtcgaacgataacgtgcttatcattggtagcggtgtgattggcctcctcatcacacaattgcttcgaagccgcacttcgggcgacattttggttaccggacgtcgcgattacctccttgaaaaggcccgtgaatttggtgccacagatgcaatcaacgtgatcgactgcgatgctgtgaaaacgctgctcaaaaaacacggtcgcgtcgatgttgtcttcgaagcagtgggctctaacgagactgtgaaccagtccatttccctggtcgaatctggaggttctatcactctcgttggcatgctcgatcgcgagatgaccgttgatatgatggaggttgttgcccgtgaaatcactctgcgaggagattatggttatacaactgacgactttaaggaggcgatcgagctcgcttcttcgggtaaagttgatctcaaaggcctcatcacgcatgttctcccgctcgatgagatcaaaaagggcttcgatatcctggcagaacgccgagaaaatgtgatcaaagttgttattaacccataacacggatcaacaaaaatgtgcgccagctttgttgtgtgcccttttcctctagcggatcctatccacatttcgtgaatgaaccgattaagctctgacgagatttccttgttttctgtagatacctcttgtagaggtgtcaaagttatgttgtgatcgagagagttacctgcaaggtattatgcaagcggcttgatgaggacactcaactacgtgtgagtaggagtgcgttgctcagcagttgacgcgtgagccgcttgagcagcttgataaaggtcctaatcgtcttccagctgttggcagacgacaatgtgctgtagtagtaggataggcccgtaaaagtgtagaagcaataggttgagactgactgtaatgggtacttgcgttcaaagactgaaagtccaaaggattgctcaaaggcccctgaggtctgagcctctgagcgcgctcttcgtcaaaattcgccggggccatcggtcatcctctcgagggcagcatcttcctgcttgaagactgagtccgtctcagataacttcgtataatgtatgctatacgaagttatcctgcaggagctcagaccttgcatgttagccttgaccttgcctctatgaccactaattcgcacaagattgcacgttaccattgtcatcttgccatgtatccaatgtttcctgtttgccatagtacgtagtagatacatcgatcatcgatgcagatgacgcagatggcattggttcgctttgccctatgcatgcatcatgcatcatgcatcatgcgtcatgcgtcactatccatattaatcattgccctctgtactaggccatgacacctgcagacccttccccagggatgcttcttgtaatagccaatatactacacaactttaccgattacgatcgagatcgatctcactatagtttgtcgaacttcgatgcacatcgagggtgcggaaaaaagctgacggaagcggaagtgggtgaattggttaatttagttagattggcagggttgttcccaagattcaacgcaagctgagaaagaaaacagaaacacgaggcataaggccagtcagaaaatgcattacgaggggagttgaagtgactgtgggccagtgcctgggtcgtcatgtgcaaattttttcttcggttagactgccgcagcatgcagcaactctgccggccctatataactagtgcttcatcttcttgtcattcttgtctctttaccaacacaccggtactctttcaccatgggtaaggaaaagacacacgtatcgcgaccccgactcaactccaacatggacgcagacctgtacggatacaaatgggctcgagataatgtcggacagtcgggtgcgacgatctacagactctatggaaaaccggacgcccccgagctctttcttaaacacggcaagggtagcgttgcaaacgacgtaaccgacgaaatggtccgtctgaattggctaactgagttcatgccactccccaccatcaagcacttcatccgtacacctgacgatgcgtggctgttgactacggccatccccggtaagaccgcttttcaggtcctcgaggaataccctgactcgggcgagaacatcgtggatgccttggctgtgtttttgcgccgccttcactctattccggtctgcaactgccctttcaacagcgaccgtgtttttaggcttgcccaggcacaatcacgcatgaacaatggtctagtcgacgctagtgatttcgatgacgagcgcaacggctggccggtggaacaagtgtggaaagagatgcataagctcctgcccttttccccagactctgtcgtgacgcatggtgatttctcgcttgacaacctcatctttgacgagggcaagctcattggctgcattgacgtcggccgggttggcatcgccgatcgctaccaagatcttgcgatcctctggaattgtctgggcgagttctcccctagcctccagaagcgtctgttccagaaatatgggatcg

SEQ ID NO: 66 - DNA, 4612 bp, synthetic construct
  source 1..4612: mol_type = other DNA
tgcagagccttgcaaatgatgaaagaccaatggaattgatcattgattattgatgatgcatgatgaaagagatagaaacagatgcaagatgggatggcgcgatgatcaaatgataatgaacgttcaacccttcaaaattgaaactctcaggctgagcggctgagcaagctctgagaatgtgggtcttcgaagactttcgcttgagcatggtgcatgtgcaaagagatggaatgtggaattgttgtaggtaggaacacagcccggtagagcggcgcagtggctcagcgaagctgggagaacgactgaaccggtcttgagattcatcatctcagcgtgcgtcagcgcgtcagcttcagcgtttgagaatggcacggactgacctgtcgtacatcccaaggaggcccgtgcgctatactcgccttgtggcctaatctgcgatcaacccatcctcaacgaaagcgcaagtagcgactaagcacactatctttcgggtcggtgcggtcacagtatcggcatctctgtctttagctacgatggtgtgcgtgtaactgatcagtacacccgctgtatcaaaactctatcttcaatccgctaagaatcgtcaccatcagtacatcagtacatcagtgggctaagatctaatggtgtcgttcgacggccgcgggcactagccacgagccaagagcggtacagttgctgcgaaatggtgggcagcctgacaggttcagtttgaataggatgaaaacgccatgaagaacagagaagctggcaattgacgatagtggggcgagcgcacgctgcttgctggtccgagcgtaggacgaacgacaaaccatgggcggggccaccaggccccagggagggcgtcactggttggatgtcgtctgttaggctagagctcaggcgctcagggcctctggcccaagcctcggacgcaagcctctgacgagcgagcgcgcgctggggcgggtctgcgcaggaacggcaggactgccgagttggttgaatattgaatggttggatgattggtttgctgggtttggttttgacacgcacggcacaggacaagtgagtttggaggttggatttgcgcaggtagaaagggcgctcggcctcagggcctcagcgtcagcagacgagctcgccagtccaggtcagtacccagtgttcgttacttcccaccgtccagagtttgctgctgcctctcagcttgattcgtgtcggagaagtagaaatggtcacagcgtaccacacactgtccccatgcctgcgtcctgctccacgagtgtttagccacaaaaatttatggacaaccttactgagcctgtgctggggggtgctttagcaccagcactggcgccatggcgtcaaggttaattccactgtcattcgacaaccttcaactgatgggggcaactgggcacaaaaccttggatatataaccaactccaactcccacggttttttaccttttgctcttctccccaggactcactacttctactcctctattcatcttcaccaaaatgtgagacctaatatcactgctgtacagacaagactgtgtatattaggtctcaatgaaagcactggtgttggaggaaatcggtaaattgacccttaaagaggttgagacgcccgtgccaggacgcggagaggttttgttgcgcatccatgcctgtggtatttgctcttcggacaaagcccgtctcttcaagaacggtactcacaccatgccgcttatcccaggtcacgagatctcgggtgagattgttgcaggaggtcccggcattcgagaagagcttatcggccgacgcgctgcggtcttcccgttgattccttgtcgccaatgcgactcctgccgaatcggcaagtacgctcaatgcgagcattacgactatttcggatcgcgtcgagacggaggctttgctgagtacctcgctgtccccgtgtttaatatcaatcttcttcccgatgatatggattatcatacggctgcattgtgcgaaccagccacggttgcatctcatgcacttaagcgcgccaaaatgaaatctggtgatatcgttacgatcattggcactggcacggtcggcctcctggctgctggcatcgctcgtattcgacgagcatctaaaatcattatcgtcggacgaagcaaagaaaaaatcatgaatgcagctcatttcgctgatcatgtgatcaatgcagagggatgggacgtgaacgaggccgtggcttcgctgacggagggtcacatgagcgatgtggtcttggagactggcggcaacagcgatgcttgcacgtacgcgcttatggctgccggcaaaggtacgactgtgatgtttattggcaatcccgaagaaccgattgtttttaaccgtgatatttattggaagatcctccgaaacgaactgacactcaagggtacttggaattctggatatgctcctgaggataatgactggaatgacgtcatccgttatatggcagatggacagattccggcagataaaattatcaccgatagctttccattggaagattataataaggcattcgagcttcttctctcggatcgcttttacaccaaaatcatgtttgacatctaacacggatcaacaaaaatgtgcgccagctttgttgtgtgcccttttcctctagcggatcctatccacatttcgtgaatgaaccgattaagctctgacgagatttccttgttttctgtagatacctcttgtagaggtgtcaaagttatgttgtgatcgagagagttacctgcaaggtattatgcaagcggcttgatgaggacactcaactacgtgtgagtaggagtgcgttgctcagcagttgacgcgtgagccgcttgagcagcttgataaaggtcctaatcgtcttccagctgttggcagacgacaatgtgctgtagtagtaggataggcccgtaaaagtgtagaagcaataggttgagactgactgtaatgggtacttgcgttcaaagactgaaagtccaaaggattgctcaaaggcccctgaggtctgagcctctgagcgcgctcttcgtcaaaattcgccggggccatcggtcatcctctcgagggcagcatcttcctgcttgaagactgagtccgtctcagataacttcgtataatgtatgctatacgaagttatcctgcaggagctcagaccttgcatgttagccttgaccttgcctctatgaccactaattcgcacaagattgcacgttaccattgtcatcttgccatgtatccaatgtttcctgtttgccatagtacgtagtagatacatcgatcatcgatgcagatgacgcagatggcattggttcgctttgccctatgcatgcatcatgcatcatgcatcatgcgtcatgcgtcactatccatattaatcattgccctctgtactaggccatgacacctgcagacccttccccagggatgcttcttgtaatagccaatatactacacaactttaccgattacgatcgagatcgatctcactatagtttgtcgaacttcgatgcacatcgagggtgcggaaaaaagctgacggaagcggaagtgggtgaattggttaatttagttagattggcagggttgttcccaagattcaacgcaagctgagaaagaaaacagaaacacgaggcataaggccagtcagaaaatgcattacgaggggagttgaagtgactgtgggccagtgcctgggtcgtcatgtgcaaattttttcttcggttagactgccgcagcatgcagcaactctgccggccctatataactagtgcttcatcttcttgtcattcttgtctctttaccaacacaccggtactctttcaccatgggtaaggaaaagacacacgtatcgcgaccccgactcaactccaacatggacgcagacctgtacggatacaaatgggctcgagataatgtcggacagtcgggtgcgacgatctacagactctatggaaaaccggacgcccccgagctctttcttaaacacggcaagggtagcgttgcaaacgacgtaaccgacgaaatggtccgtctgaattggctaactgagttcatgccactccccaccatcaagcacttcatccgtacacctgacgatgcgtggctgttgactacggccatccccggtaagaccgcttttcaggtcctcgaggaataccctgactcgggcgagaacatcgtggatgccttggctgtgtttttgcgccgccttcactctattccggtctgcaactgccctttcaacagcgaccgtgtttttaggcttgcccaggcacaatcacgcatgaacaatggtctagtcgacgctagtgatttcgatgacgagcgcaacggctggccggtggaacaagtgtggaaagagatgcataagctcctgcccttttccccagactctgtcgtgacgcatggtgatttctcgcttgacaacctcatctttgacgagggcaagctcattggctgcattgacgtcggccgggttggcatcgccgatcgctaccaagatcttgcgatcctctggaattgtctgggcgagttctcccctagcctccagaagcgtctgttccagaaatatgggatcg

SEQ ID NO: 67 - DNA, 4627 bp, synthetic construct
  source 1..4627: mol_type = other DNA
tgcagagccttgcaaatgatgaaagaccaatggaattgatcattgattattgatgatgcatgatgaaagagatagaaacagatgcaagatgggatggcgcgatgatcaaatgataatgaacgttcaacccttcaaaattgaaactctcaggctgagcggctgagcaagctctgagaatgtgggtcttcgaagactttcgcttgagcatggtgcatgtgcaaagagatggaatgtggaattgttgtaggtaggaacacagcccggtagagcggcgcagtggctcagcgaagctgggagaacgactgaaccggtcttgagattcatcatctcagcgtgcgtcagcgcgtcagcttcagcgtttgagaatggcacggactgacctgtcgtacatcccaaggaggcccgtgcgctatactcgccttgtggcctaatctgcgatcaacccatcctcaacgaaagcgcaagtagcgactaagcacactatctttcgggtcggtgcggtcacagtatcggcatctctgtctttagctacgatggtgtgcgtgtaactgatcagtacacccgctgtatcaaaactctatcttcaatccgctaagaatcgtcaccatcagtacatcagtacatcagtgggctaagatctaatggtgtcgttcgacggccgcgggcactagccacgagccaagagcggtacagttgctgcgaaatggtgggcagcctgacaggttcagtttgaataggatgaaaacgccatgaagaacagagaagctggcaattgacgatagtggggcgagcgcacgctgcttgctggtccgagcgtaggacgaacgacaaaccatgggcggggccaccaggccccagggagggcgtcactggttggatgtcgtctgttaggctagagctcaggcgctcagggcctctggcccaagcctcggacgcaagcctctgacgagcgagcgcgcgctggggcgggtctgcgcaggaacggcaggactgccgagttggttgaatattgaatggttggatgattggtttgctgggtttggttttgacacgcacggcacaggacaagtgagtttggaggttggatttgcgcaggtagaaagggcgctcggcctcagggcctcagcgtcagcagacgagctcgccagtccaggtcagtacccagtgttcgttacttcccaccgtccagagtttgctgctgcctctcagcttgattcgtgtcggagaagtagaaatggtcacagcgtaccacacactgtccccatgcctgcgtcctgctccacgagtgtttagccacaaaaatttatggacaaccttactgagcctgtgctggggggtgctttagcaccagcactggcgccatggcgtcaaggttaattccactgtcattcgacaaccttcaactgatgggggcaactgggcacaaaaccttggatatataaccaactccaactcccacggttttttaccttttgctcttctccccaggactcactacttctactcctctattcatcttcaccaaaatgtgagacctaatatcactgctgtacagacaagactgtgtatattaggtctcaatgaaagccaatgttctgtaccacattggtgacctgcgatacactgacgttgccttgccggaactccacgacggtgaggccctcgtgcgagttcgtgcatgcggtatttgtggtagcgatgttgcccgagtcttcaccactggtacgtatcatttccccaccattattggccatgagttctcgggcgaagtcgttgaaacatattctgcggctgacgcggagtgggtgggtcgccgcgtgagcgtttttcccctcatcccttgtcgccattgtgatgcctgtcatcatggtcagtacgaaatgtgcacatgttacaactatctcggcagccgtaccgatggaggcttcgcagagtacgtggctgtcccggtctggaatctctttcgtctgccagattccgtgtcttacgaggagggcgcaatgatggaaccggccgctgtcgctatgcacgcgctcaagattgcccgtgtgggtatgggtgacactgtggcaattacaggtcccggaactattggtatgattttgacccaattgatccaacgtattggcggtacaaaagcggttctgatcggacgcacccaagcaaaattggattacgcacgacgcatcggcatccgtcatgtgtgcaattcgggaaccgagcacgtcgcggaccgcgttggacaacttacaggcggacgtggagccgacatcgcaattgaaggaaccggtgcgtcggaacccatgaatctgtgcttgaatttggtgcgctctgaaggacgtattgtcgctatgggaaacccccaaggtgacatgctgttccgaaaggatgcgtattggaagcttctgcgcaagcagctgacccttcgtggaacctggaattcgacatatggattgggccgagatgattggcaggatatttccgcccttcttgctgagggagcattgaacttgcgcggccttatcacacaccgactcccactggccgagctgcagcagggactcagcctcatgcgagacgcagcagtctacactaacaaagttatgatcgtcgacgagcaaggttaacacggatcaacaaaaatgtgcgccagctttgttgtgtgcccttttcctctagcggatcctatccacatttcgtgaatgaaccgattaagctctgacgagatttccttgttttctgtagatacctcttgtagaggtgtcaaagttatgttgtgatcgagagagttacctgcaaggtattatgcaagcggcttgatgaggacactcaactacgtgtgagtaggagtgcgttgctcagcagttgacgcgtgagccgcttgagcagcttgataaaggtcctaatcgtcttccagctgttggcagacgacaatgtgctgtagtagtaggataggcccgtaaaagtgtagaagcaataggttgagactgactgtaatgggtacttgcgttcaaagactgaaagtccaaaggattgctcaaaggcccctgaggtctgagcctctgagcgcgctcttcgtcaaaattcgccggggccatcggtcatcctctcgagggcagcatcttcctgcttgaagactgagtccgtctcagataacttcgtataatgtatgctatacgaagttatcctgcaggagctcagaccttgcatgttagccttgaccttgcctctatgaccactaattcgcacaagattgcacgttaccattgtcatcttgccatgtatccaatgtttcctgtttgccatagtacgtagtagatacatcgatcatcgatgcagatgacgcagatggcattggttcgctttgccctatgcatgcatcatgcatcatgcatcatgcgtcatgcgtcactatccatattaatcattgccctctgtactaggccatgacacctgcagacccttccccagggatgcttcttgtaatagccaatatactacacaactttaccgattacgatcgagatcgatctcactatagtttgtcgaacttcgatgcacatcgagggtgcggaaaaaagctgacggaagcggaagtgggtgaattggttaatttagttagattggcagggttgttcccaagattcaacgcaagctgagaaagaaaacagaaacacgaggcataaggccagtcagaaaatgcattacgaggggagttgaagtgactgtgggccagtgcctgggtcgtcatgtgcaaattttttcttcggttagactgccgcagcatgcagcaactctgccggccctatataactagtgcttcatcttcttgtcattcttgtctctttaccaacacaccggtactctttcaccatgggtaaggaaaagacacacgtatcgcgaccccgactcaactccaacatggacgcagacctgtacggatacaaatgggctcgagataatgtcggacagtcgggtgcgacgatctacagactctatggaaaaccggacgcccccgagctctttcttaaacacggcaagggtagcgttgcaaacgacgtaaccgacgaaatggtccgtctgaattggctaactgagttcatgccactccccaccatcaagcacttcatccgtacacctgacgatgcgtggctgttgactacggccatccccggtaagaccgcttttcaggtcctcgaggaataccctgactcgggcgagaacatcgtggatgccttggctgtgtttttgcgccgccttcactctattccggtctgcaactgccctttcaacagcgaccgtgtttttaggcttgcccaggcacaatcacgcatgaacaatggtctagtcgacgctagtgatttcgatgacgagcgcaacggctggccggtggaacaagtgtggaaagagatgcataagctcctgcccttttccccagactctgtcgtgacgcatggtgatttctcgcttgacaacctcatctttgacgagggcaagctcattggctgcattgacgtcggccgggttggcatcgccgatcgctaccaagatcttgcgatcctctggaattgtctgggcgagttctcccctagcctccagaagcgtctgttccagaaatatgggatcg

SEQ ID NO: 68 - DNA, 4594 bp, synthetic construct
  source 1..4594: mol_type = other DNA
tgcagagccttgcaaatgatgaaagaccaatggaattgatcattgattattgatgatgcatgatgaaagagatagaaacagatgcaagatgggatggcgcgatgatcaaatgataatgaacgttcaacccttcaaaattgaaactctcaggctgagcggctgagcaagctctgagaatgtgggtcttcgaagactttcgcttgagcatggtgcatgtgcaaagagatggaatgtggaattgttgtaggtaggaacacagcccggtagagcggcgcagtggctcagcgaagctgggagaacgactgaaccggtcttgagattcatcatctcagcgtgcgtcagcgcgtcagcttcagcgtttgagaatggcacggactgacctgtcgtacatcccaaggaggcccgtgcgctatactcgccttgtggcctaatctgcgatcaacccatcctcaacgaaagcgcaagtagcgactaagcacactatctttcgggtcggtgcggtcacagtatcggcatctctgtctttagctacgatggtgtgcgtgtaactgatcagtacacccgctgtatcaaaactctatcttcaatccgctaagaatcgtcaccatcagtacatcagtacatcagtgggctaagatctaatggtgtcgttcgacggccgcgggcactagccacgagccaagagcggtacagttgctgcgaaatggtgggcagcctgacaggttcagtttgaataggatgaaaacgccatgaagaacagagaagctggcaattgacgatagtggggcgagcgcacgctgcttgctggtccgagcgtaggacgaacgacaaaccatgggcggggccaccaggccccagggagggcgtcactggttggatgtcgtctgttaggctagagctcaggcgctcagggcctctggcccaagcctcggacgcaagcctctgacgagcgagcgcgcgctggggcgggtctgcgcaggaacggcaggactgccgagttggttgaatattgaatggttggatgattggtttgctgggtttggttttgacacgcacggcacaggacaagtgagtttggaggttggatttgcgcaggtagaaagggcgctcggcctcagggcctcagcgtcagcagacgagctcgccagtccaggtcagtacccagtgttcgttacttcccaccgtccagagtttgctgctgcctctcagcttgattcgtgtcggagaagtagaaatggtcacagcgtaccacacactgtccccatgcctgcgtcctgctccacgagtgtttagccacaaaaatttatggacaaccttactgagcctgtgctggggggtgctttagcaccagcactggcgccatggcgtcaaggttaattccactgtcattcgacaaccttcaactgatgggggcaactgggcacaaaaccttggatatataaccaactccaactcccacggttttttaccttttgctcttctccccaggactcactacttctactcctctattcatcttcaccaaaatgtgagacctaatatcactgctgtacagacaagactgtgtatattaggtctcaatgcgcgcctatgagcttcacggagtcaacgacttgcgtcgcgaggacatcgaaaaacctgagattccctctggatgggttcttgtgcaagtcaaagcgagcggcatttgcagctccgacatccctcgtatcttcacgaacggcacttatcactttcctaccattccgggccacgaattctctggagtcgtggccgcctatggcgaaggtgtcccggaagaacgcgttggcaaacgagtgggtatttttccgctgatcccgtgtcgtacatgtccccaatgccgccagaagaaatacgaaatgtgcgagcactatgattaccttggctcgcgtcgtgacggcggattcgccgaatacgttgcagtcccggactggaacctcctggaattgccggagaacgtttcgttccgcgaggcggcgatgctcgaacctctgtcggtggcacttcatgccgtgaaacgcagcggcgtgaaacctggtgatacagccgctgtgatcggcacaggaatgatcggttttgccgcagctgcttgggccaaagcactgggagcagaaacggtgttcgtgattggacgcggcgaggccaaacgcgctattgctgaacaaattcccggaatttcctatgtgactgaagaggaatccaaggccattcaggcggacgtggtcgtcgaagcagttggtacaccacaggctgtttcctccgcggtgttgcttgcacgaccgggaggttccattgttctgatgggcaacccatccggtgatcttgcgatggaaaaaaacgtctactggcgtatcctccgtaagcaacttaacttgatgggaacgtggaatagctcgtatgaaaaagacgaagcctgtgactggaccgaagcgctcgacgcattgtccaagaaaaagattcctgcccaagcacttatcactcattgttttcccagcgaaaaacttatggatggactggaattgatgaagaatcataaggaaccatactgtaaagttatggtcagctgggagtaacacggatcaacaaaaatgtgcgccagctttgttgtgtgcccttttcctctagcggatcctatccacatttcgtgaatgaaccgattaagctctgacgagatttccttgttttctgtagatacctcttgtagaggtgtcaaagttatgttgtgatcgagagagttacctgcaaggtattatgcaagcggcttgatgaggacactcaactacgtgtgagtaggagtgcgttgctcagcagttgacgcgtgagccgcttgagcagcttgataaaggtcctaatcgtcttccagctgttggcagacgacaatgtgctgtagtagtaggataggcccgtaaaagtgtagaagcaataggttgagactgactgtaatgggtacttgcgttcaaagactgaaagtccaaaggattgctcaaaggcccctgaggtctgagcctctgagcgcgctcttcgtcaaaattcgccggggccatcggtcatcctctcgagggcagcatcttcctgcttgaagactgagtccgtctcagataacttcgtataatgtatgctatacgaagttatcctgcaggagctcagaccttgcatgttagccttgaccttgcctctatgaccactaattcgcacaagattgcacgttaccattgtcatcttgccatgtatccaatgtttcctgtttgccatagtacgtagtagatacatcgatcatcgatgcagatgacgcagatggcattggttcgctttgccctatgcatgcatcatgcatcatgcatcatgcgtcatgcgtcactatccatattaatcattgccctctgtactaggccatgacacctgcagacccttccccagggatgcttcttgtaatagccaatatactacacaactttaccgattacgatcgagatcgatctcactatagtttgtcgaacttcgatgcacatcgagggtgcggaaaaaagctgacggaagcggaagtgggtgaattggttaatttagttagattggcagggttgttcccaagattcaacgcaagctgagaaagaaaacagaaacacgaggcataaggccagtcagaaaatgcattacgaggggagttgaagtgactgtgggccagtgcctgggtcgtcatgtgcaaattttttcttcggttagactgccgcagcatgcagcaactctgccggccctatataactagtgcttcatcttcttgtcattcttgtctctttaccaacacaccggtactctttcaccatgggtaaggaaaagacacacgtatcgcgaccccgactcaactccaacatggacgcagacctgtacggatacaaatgggctcgagataatgtcggacagtcgggtgcgacgatctacagactctatggaaaaccggacgcccccgagctctttcttaaacacggcaagggtagcgttgcaaacgacgtaaccgacgaaatggtccgtctgaattggctaactgagttcatgccactccccaccatcaagcacttcatccgtacacctgacgatgcgtggctgttgactacggccatccccggtaagaccgcttttcaggtcctcgaggaataccctgactcgggcgagaacatcgtggatgccttggctgtgtttttgcgccgccttcactctattccggtctgcaactgccctttcaacagcgaccgtgtttttaggcttgcccaggcacaatcacgcatgaacaatggtctagtcgacgctagtgatttcgatgacgagcgcaacggctggccggtggaacaagtgtggaaagagatgcataagctcctgcccttttccccagactctgtcgtgacgcatggtgatttctcgcttgacaacctcatctttgacgagggcaagctcattggctgcattgacgtcggccgggttggcatcgccgatcgctaccaagatcttgcgatcctctggaattgtctgggcgagttctcccctagcctccagaagcgtctgttccagaaatatgggatcg

SEQ ID NO: 69 - DNA, 4645 bp, synthetic construct
  source 1..4645: mol_type = other DNA
tgcagagccttgcaaatgatgaaagaccaatggaattgatcattgattattgatgatgcatgatgaaagagatagaaacagatgcaagatgggatggcgcgatgatcaaatgataatgaacgttcaacccttcaaaattgaaactctcaggctgagcggctgagcaagctctgagaatgtgggtcttcgaagactttcgcttgagcatggtgcatgtgcaaagagatggaatgtggaattgttgtaggtaggaacacagcccggtagagcggcgcagtggctcagcgaagctgggagaacgactgaaccggtcttgagattcatcatctcagcgtgcgtcagcgcgtcagcttcagcgtttgagaatggcacggactgacctgtcgtacatcccaaggaggcccgtgcgctatactcgccttgtggcctaatctgcgatcaacccatcctcaacgaaagcgcaagtagcgactaagcacactatctttcgggtcggtgcggtcacagtatcggcatctctgtctttagctacgatggtgtgcgtgtaactgatcagtacacccgctgtatcaaaactctatcttcaatccgctaagaatcgtcaccatcagtacatcagtacatcagtgggctaagatctaatggtgtcgttcgacggccgcgggcactagccacgagccaagagcggtacagttgctgcgaaatggtgggcagcctgacaggttcagtttgaataggatgaaaacgccatgaagaacagagaagctggcaattgacgatagtggggcgagcgcacgctgcttgctggtccgagcgtaggacgaacgacaaaccatgggcggggccaccaggccccagggagggcgtcactggttggatgtcgtctgttaggctagagctcaggcgctcagggcctctggcccaagcctcggacgcaagcctctgacgagcgagcgcgcgctggggcgggtctgcgcaggaacggcaggactgccgagttggttgaatattgaatggttggatgattggtttgctgggtttggttttgacacgcacggcacaggacaagtgagtttggaggttggatttgcgcaggtagaaagggcgctcggcctcagggcctcagcgtcagcagacgagctcgccagtccaggtcagtacccagtgttcgttacttcccaccgtccagagtttgctgctgcctctcagcttgattcgtgtcggagaagtagaaatggtcacagcgtaccacacactgtccccatgcctgcgtcctgctccacgagtgtttagccacaaaaatttatggacaaccttactgagcctgtgctggggggtgctttagcaccagcactggcgccatggcgtcaaggttaattccactgtcattcgacaaccttcaactgatgggggcaactgggcacaaaaccttggatatataaccaactccaactcccacggttttttaccttttgctcttctccccaggactcactacttctactcctctattcatcttcaccaaaatgtgagacctaatatcactgctgtacagacaagactgtgtatattaggtctcaatgaagcgtatgcgagctgccatcttgtatggaccaaaagacatccgaattgaaaacattgagatgcccaaggttaagccggagtgggtgcttattaaggttcgcgcaacaggtatctgcggttctgatctgcacttttacaaagagaagagctttattcctattattagcgacgtgggcaaaggacgctacgtccccggtcatgaattttcgggcgaggtctacgagttgggttcgaaggtcaaaggcctgaagaaaggagatcgcgtcggcgtcgaacccatcattggttgcggcaaatgtcagtggtgcaaggtcggatgttacaacttgtgtgagcactacaaattgattggctttcactatattggaggtatggctgagtattgtgttgctcctgctgagaattgttttaagctcccaaacaatgtttcgttcgaaagcgcggcaatgcttgactgtatcgccgtggctattcacgcagtgaataaagcagaaattcgcggcggtgacagcgttctcattgtcggcgccggtgccatcggactcttcgccctccaggcagcgctcatccagggagcgagcgacgtgtacgtcgttggaaaatacgaattccagttggagaaagctcgcaagttgggagcgacagctgtgattaacgctaaaaacgaatctttctccgaaaaaatcatggaaattacttcgggtaaaggagtcgataaggtcattgaggccgtcggcggagcctccaatgttatttctgacgtccttgacgtgactcgaaaaaagggtactatcgtgaccactggtatctttacacgaccactctcggtcgattttttcaaaattctcacaaaagagttgacgatcacttcgtcgtggggatactgttacttcgaccgtcgcaaggagtttggcacggcgctcgactttctggcaaaagaaaagatcaacactcaggaacttattacacataagtatcctttggagaaggtttccgaagcctttgagacggcactcaacaaaaataaggagaagagcatcaaggtggagattatcttctaacacggatcaacaaaaatgtgcgccagctttgttgtgtgcccttttcctctagcggatcctatccacatttcgtgaatgaaccgattaagctctgacgagatttccttgttttctgtagatacctcttgtagaggtgtcaaagttatgttgtgatcgagagagttacctgcaaggtattatgcaagcggcttgatgaggacactcaactacgtgtgagtaggagtgcgttgctcagcagttgacgcgtgagccgcttgagcagcttgataaaggtcctaatcgtcttccagctgttggcagacgacaatgtgctgtagtagtaggataggcccgtaaaagtgtagaagcaataggttgagactgactgtaatgggtacttgcgttcaaagactgaaagtccaaaggattgctcaaaggcccctgaggtctgagcctctgagcgcgctcttcgtcaaaattcgccggggccatcggtcatcctctcgagggcagcatcttcctgcttgaagactgagtccgtctcagataacttcgtataatgtatgctatacgaagttatcctgcaggagctcagaccttgcatgttagccttgaccttgcctctatgaccactaattcgcacaagattgcacgttaccattgtcatcttgccatgtatccaatgtttcctgtttgccatagtacgtagtagatacatcgatcatcgatgcagatgacgcagatggcattggttcgctttgccctatgcatgcatcatgcatcatgcatcatgcgtcatgcgtcactatccatattaatcattgccctctgtactaggccatgacacctgcagacccttccccagggatgcttcttgtaatagccaatatactacacaactttaccgattacgatcgagatcgatctcactatagtttgtcgaacttcgatgcacatcgagggtgcggaaaaaagctgacggaagcggaagtgggtgaattggttaatttagttagattggcagggttgttcccaagattcaacgcaagctgagaaagaaaacagaaacacgaggcataaggccagtcagaaaatgcattacgaggggagttgaagtgactgtgggccagtgcctgggtcgtcatgtgcaaattttttcttcggttagactgccgcagcatgcagcaactctgccggccctatataactagtgcttcatcttcttgtcattcttgtctctttaccaacacaccggtactctttcaccatgggtaaggaaaagacacacgtatcgcgaccccgactcaactccaacatggacgcagacctgtacggatacaaatgggctcgagataatgtcggacagtcgggtgcgacgatctacagactctatggaaaaccggacgcccccgagctctttcttaaacacggcaagggtagcgttgcaaacgacgtaaccgacgaaatggtccgtctgaattggctaactgagttcatgccactccccaccatcaagcacttcatccgtacacctgacgatgcgtggctgttgactacggccatccccggtaagaccgcttttcaggtcctcgaggaataccctgactcgggcgagaacatcgtggatgccttggctgtgtttttgcgccgccttcactctattccggtctgcaactgccctttcaacagcgaccgtgtttttaggcttgcccaggcacaatcacgcatgaacaatggtctagtcgacgctagtgatttcgatgacgagcgcaacggctggccggtggaacaagtgtggaaagagatgcataagctcctgcccttttccccagactctgtcgtgacgcatggtgatttctcgcttgacaacctcatctttgacgagggcaagctcattggctgcattgacgtcggccgggttggcatcgccgatcgctaccaagatcttgcgatcctctggaattgtctgggcgagttctcccctagcctccagaagcgtctgttccagaaatatgggatcg

SEQ ID NO: 70 - DNA, 4633 bp, synthetic construct
  source 1..4633: mol_type = other DNA
tgcagagccttgcaaatgatgaaagaccaatggaattgatcattgattattgatgatgcatgatgaaagagatagaaacagatgcaagatgggatggcgcgatgatcaaatgataatgaacgttcaacccttcaaaattgaaactctcaggctgagcggctgagcaagctctgagaatgtgggtcttcgaagactttcgcttgagcatggtgcatgtgcaaagagatggaatgtggaattgttgtaggtaggaacacagcccggtagagcggcgcagtggctcagcgaagctgggagaacgactgaaccggtcttgagattcatcatctcagcgtgcgtcagcgcgtcagcttcagcgtttgagaatggcacggactgacctgtcgtacatcccaaggaggcccgtgcgctatactcgccttgtggcctaatctgcgatcaacccatcctcaacgaaagcgcaagtagcgactaagcacactatctttcgggtcggtgcggtcacagtatcggcatctctgtctttagctacgatggtgtgcgtgtaactgatcagtacacccgctgtatcaaaactctatcttcaatccgctaagaatcgtcaccatcagtacatcagtacatcagtgggctaagatctaatggtgtcgttcgacggccgcgggcactagccacgagccaagagcggtacagttgctgcgaaatggtgggcagcctgacaggttcagtttgaataggatgaaaacgccatgaagaacagagaagctggcaattgacgatagtggggcgagcgcacgctgcttgctggtccgagcgtaggacgaacgacaaaccatgggcggggccaccaggccccagggagggcgtcactggttggatgtcgtctgttaggctagagctcaggcgctcagggcctctggcccaagcctcggacgcaagcctctgacgagcgagcgcgcgctggggcgggtctgcgcaggaacggcaggactgccgagttggttgaatattgaatggttggatgattggtttgctgggtttggttttgacacgcacggcacaggacaagtgagtttggaggttggatttgcgcaggtagaaagggcgctcggcctcagggcctcagcgtcagcagacgagctcgccagtccaggtcagtacccagtgttcgttacttcccaccgtccagagtttgctgctgcctctcagcttgattcgtgtcggagaagtagaaatggtcacagcgtaccacacactgtccccatgcctgcgtcctgctccacgagtgtttagccacaaaaatttatggacaaccttactgagcctgtgctggggggtgctttagcaccagcactggcgccatggcgtcaaggttaattccactgtcattcgacaaccttcaactgatgggggcaactgggcacaaaaccttggatatataaccaactccaactcccacggttttttaccttttgctcttctccccaggactcactacttctactcctctattcatcttcaccaaaatgtgagacctaatatcactgctgtacagacaagactgtgtatattaggtctcaatgaaagcctgggtgctgcacggtatcggagatatccaatacgaggaagttaaggagccgcagtcggctggcgacgaggttattatgaaagtgatgagcgtgggaatctgtggatctgacatccctcgcatttataaaaccggcacctatcatttcccaacaatccccggccacgaattctccggtattgtggccgatgttggtgccggagtcaacccgaaatggaagaataagcgcgtcggcgtgtttccattgatcccatgtcacgtttgtgcttcgtgtaaaaaaggtcaatatgaaatgtgtcgcaactacggatatctgggtagccgccaaaatggtggttttgcagagtatgcggcggttcctgtcaagaatctcatcgaactcccggactctgtctctatgcaggaagctgccatgcttgagccgatggccgtggcagtccatgctatgcgacgagcccgtcccatgaccggagatcgtattgtcgtgtgcggacttggaactatcggcatgcttctcgtgtcctttttgcgagagacgggaattcgagacatctttgtcatcggcaataaggcattccagcgaatcaccatcctcaaaactggcctgcaggaaaactgttattgtgattctcgcgtgcaggatgtcgagaagtggctcatggagcgaactgaaggaaagggcgcagacgtgttctttgagtgtgttggccgaaacgaaaccatctcccaagcagtcaacctgacggcacccggaggttcggtctgtctggttggtaatccttgttcggatatgacgcttgagcgtgaggtctactggaaaattctccgtaaccagcttactattactggcacctggaattcctcgttcacccacgagatcgaggacgactggcattacgtgttggatcgcctggaacaaggtaagatctcgcctggtgatctcatttctcacaaattcccgctcaagaacttggaatctggtctgcatattatgcgtgataagactcaagattatatcaaaatcatggccgagattaatgtgtaacacggatcaacaaaaatgtgcgccagctttgttgtgtgcccttttcctctagcggatcctatccacatttcgtgaatgaaccgattaagctctgacgagatttccttgttttctgtagatacctcttgtagaggtgtcaaagttatgttgtgatcgagagagttacctgcaaggtattatgcaagcggcttgatgaggacactcaactacgtgtgagtaggagtgcgttgctcagcagttgacgcgtgagccgcttgagcagcttgataaaggtcctaatcgtcttccagctgttggcagacgacaatgtgctgtagtagtaggataggcccgtaaaagtgtagaagcaataggttgagactgactgtaatgggtacttgcgttcaaagactgaaagtccaaaggattgctcaaaggcccctgaggtctgagcctctgagcgcgctcttcgtcaaaattcgccggggccatcggtcatcctctcgagggcagcatcttcctgcttgaagactgagtccgtctcagataacttcgtataatgtatgctatacgaagttatcctgcaggagctcagaccttgcatgttagccttgaccttgcctctatgaccactaattcgcacaagattgcacgttaccattgtcatcttgccatgtatccaatgtttcctgtttgccatagtacgtagtagatacatcgatcatcgatgcagatgacgcagatggcattggttcgctttgccctatgcatgcatcatgcatcatgcatcatgcgtcatgcgtcactatccatattaatcattgccctctgtactaggccatgacacctgcagacccttccccagggatgcttcttgtaatagccaatatactacacaactttaccgattacgatcgagatcgatctcactatagtttgtcgaacttcgatgcacatcgagggtgcggaaaaaagctgacggaagcggaagtgggtgaattggttaatttagttagattggcagggttgttcccaagattcaacgcaagctgagaaagaaaacagaaacacgaggcataaggccagtcagaaaatgcattacgaggggagttgaagtgactgtgggccagtgcctgggtcgtcatgtgcaaattttttcttcggttagactgccgcagcatgcagcaactctgccggccctatataactagtgcttcatcttcttgtcattcttgtctctttaccaacacaccggtactctttcaccatgggtaaggaaaagacacacgtatcgcgaccccgactcaactccaacatggacgcagacctgtacggatacaaatgggctcgagataatgtcggacagtcgggtgcgacgatctacagactctatggaaaaccggacgcccccgagctctttcttaaacacggcaagggtagcgttgcaaacgacgtaaccgacgaaatggtccgtctgaattggctaactgagttcatgccactccccaccatcaagcacttcatccgtacacctgacgatgcgtggctgttgactacggccatccccggtaagaccgcttttcaggtcctcgaggaataccctgactcgggcgagaacatcgtggatgccttggctgtgtttttgcgccgccttcactctattccggtctgcaactgccctttcaacagcgaccgtgtttttaggcttgcccaggcacaatcacgcatgaacaatggtctagtcgacgctagtgatttcgatgacgagcgcaacggctggccggtggaacaagtgtggaaagagatgcataagctcctgcccttttccccagactctgtcgtgacgcatggtgatttctcgcttgacaacctcatctttgacgagggcaagctcattggctgcattgacgtcggccgggttggcatcgccgatcgctaccaagatcttgcgatcctctggaattgtctgggcgagttctcccctagcctccagaagcgtctgttccagaaatatgggatcg

SEQ ID NO: 71 - DNA, 4573 bp, synthetic construct
  source 1..4573: mol_type = other DNA
tgcagagccttgcaaatgatgaaagaccaatggaattgatcattgattattgatgatgcatgatgaaagagatagaaacagatgcaagatgggatggcgcgatgatcaaatgataatgaacgttcaacccttcaaaattgaaactctcaggctgagcggctgagcaagctctgagaatgtgggtcttcgaagactttcgcttgagcatggtgcatgtgcaaagagatggaatgtggaattgttgtaggtaggaacacagcccggtagagcggcgcagtggctcagcgaagctgggagaacgactgaaccggtcttgagattcatcatctcagcgtgcgtcagcgcgtcagcttcagcgtttgagaatggcacggactgacctgtcgtacatcccaaggaggcccgtgcgctatactcgccttgtggcctaatctgcgatcaacccatcctcaacgaaagcgcaagtagcgactaagcacactatctttcgggtcggtgcggtcacagtatcggcatctctgtctttagctacgatggtgtgcgtgtaactgatcagtacacccgctgtatcaaaactctatcttcaatccgctaagaatcgtcaccatcagtacatcagtacatcagtgggctaagatctaatggtgtcgttcgacggccgcgggcactagccacgagccaagagcggtacagttgctgcgaaatggtgggcagcctgacaggttcagtttgaataggatgaaaacgccatgaagaacagagaagctggcaattgacgatagtggggcgagcgcacgctgcttgctggtccgagcgtaggacgaacgacaaaccatgggcggggccaccaggccccagggagggcgtcactggttggatgtcgtctgttaggctagagctcaggcgctcagggcctctggcccaagcctcggacgcaagcctctgacgagcgagcgcgcgctggggcgggtctgcgcaggaacggcaggactgccgagttggttgaatattgaatggttggatgattggtttgctgggtttggttttgacacgcacggcacaggacaagtgagtttggaggttggatttgcgcaggtagaaagggcgctcggcctcagggcctcagcgtcagcagacgagctcgccagtccaggtcagtacccagtgttcgttacttcccaccgtccagagtttgctgctgcctctcagcttgattcgtgtcggagaagtagaaatggtcacagcgtaccacacactgtccccatgcctgcgtcctgctccacgagtgtttagccacaaaaatttatggacaaccttactgagcctgtgctggggggtgctttagcaccagcactggcgccatggcgtcaaggttaattccactgtcattcgacaaccttcaactgatgggggcaactgggcacaaaaccttggatatataaccaactccaactcccacggttttttaccttttgctcttctccccaggactcactacttctactcctctattcatcttcaccaaaatgaaggccgcagtgctccattccgaaaatctgtttacgtacgaagaagtggaaatcgatccctgcaaagacgacgaggttaagatcaaggtgatggctgcgggtatctgtggttccgatacacataagatgacgagcaaatggaaatatccccttccgaccatcatgggccatgagttttcgggctttatcgtcgagattggtgaaaaggtcactaacgcgtcgattggcgatcgagttgtggcgatccctttcttgccgtgcaatgactgcgaatactgtaagcgtggacaattctcgttgtgcgaggatcacggcatggttggatccaaaagctttggtggtttcgcggagtacgtcaatatcaaaagcactaatgttcttccgattggtgacatggattttgaggaagcagccatgattgaacctctcgcagttgcgcttcacggcgtgttgaatattcatccgcgtattggagatattgcagccgtctttggtattggcacaatcggaatcctcacaatccaatggcttaaaattgcaggagtgaaagaggttattgcgatcgacatttccgataacaagctcgcagacgcccatgctatgggctgtgagcgtactatcaatccatttaaagagaacctccttgagaaaatcgacgaatatactaacggtcgcggtgttgacatcgcctttgagtgtgctggatctaaagtcacacaagaacagtgcctgctcgtgacagccaagcgaggaaaagtcggctatttgggtatcgcttactctgatgtccatttgtcggagcaagcttttgaaaacattttccgccgcgagctcacacttaaaggattttggaactcttactccgcaccattcccgggagaggaatggaccaaaagcattgacttcattaataagggtcgtattaaactgaaagagctgattagccaccgatttaagctccaagatactcagaaagcgtttgacatgatgatcaaccgagaagagacatacggcaaggtgcttattttgcccaacaaagagtaacacggatcaacaaaaatgtgcgccagctttgttgtgtgcccttttcctctagcggatcctatccacatttcgtgaatgaaccgattaagctctgacgagatttccttgttttctgtagatacctcttgtagaggtgtcaaagttatgttgtgatcgagagagttacctgcaaggtattatgcaagcggcttgatgaggacactcaactacgtgtgagtaggagtgcgttgctcagcagttgacgcgtgagccgcttgagcagcttgataaaggtcctaatcgtcttccagctgttggcagacgacaatgtgctgtagtagtaggataggcccgtaaaagtgtagaagcaataggttgagactgactgtaatgggtacttgcgttcaaagactgaaagtccaaaggattgctcaaaggcccctgaggtctgagcctctgagcgcgctcttcgtcaaaattcgccggggccatcggtcatcctctcgagggcagcatcttcctgcttgaagactgagtccgtctcagataacttcgtataatgtatgctatacgaagttatcctgcaggagctcagaccttgcatgttagccttgaccttgcctctatgaccactaattcgcacaagattgcacgttaccattgtcatcttgccatgtatccaatgtttcctgtttgccatagtacgtagtagatacatcgatcatcgatgcagatgacgcagatggcattggttcgctttgccctatgcatgcatcatgcatcatgcatcatgcgtcatgcgtcactatccatattaatcattgccctctgtactaggccatgacacctgcagacccttccccagggatgcttcttgtaatagccaatatactacacaactttaccgattacgatcgagatcgatctcactatagtttgtcgaacttcgatgcacatcgagggtgcggaaaaaagctgacggaagcggaagtgggtgaattggttaatttagttagattggcagggttgttcccaagattcaacgcaagctgagaaagaaaacagaaacacgaggcataaggccagtcagaaaatgcattacgaggggagttgaagtgactgtgggccagtgcctgggtcgtcatgtgcaaattttttcttcggttagactgccgcagcatgcagcaactctgccggccctatataactagtgcttcatcttcttgtcattcttgtctctttaccaacacaccggtactctttcaccatgggtaaggaaaagacacacgtatcgcgaccccgactcaactccaacatggacgcagacctgtacggatacaaatgggctcgagataatgtcggacagtcgggtgcgacgatctacagactctatggaaaaccggacgcccccgagctctttcttaaacacggcaagggtagcgttgcaaacgacgtaaccgacgaaatggtccgtctgaattggctaactgagttcatgccactccccaccatcaagcacttcatccgtacacctgacgatgcgtggctgttgactacggccatccccggtaagaccgcttttcaggtcctcgaggaataccctgactcgggcgagaacatcgtggatgccttggctgtgtttttgcgccgccttcactctattccggtctgcaactgccctttcaacagcgaccgtgtttttaggcttgcccaggcacaatcacgcatgaacaatggtctagtcgacgctagtgatttcgatgacgagcgcaacggctggccggtggaacaagtgtggaaagagatgcataagctcctgcccttttccccagactctgtcgtgacgcatggtgatttctcgcttgacaacctcatctttgacgagggcaagctcattggctgcattgacgtcggccgggttggcatcgccgatcgctaccaagatcttgcgatcctctggaattgtctgggcgagttctcccctagcctccagaagcgtctgttccagaaatatgggatcg

SEQ ID NO: 72 - DNA, 4573 bp, synthetic construct
  source 1..4573: mol_type = other DNA
tgcagagccttgcaaatgatgaaagaccaatggaattgatcattgattattgatgatgcatgatgaaagagatagaaacagatgcaagatgggatggcgcgatgatcaaatgataatgaacgttcaacccttcaaaattgaaactctcaggctgagcggctgagcaagctctgagaatgtgggtcttcgaagactttcgcttgagcatggtgcatgtgcaaagagatggaatgtggaattgttgtaggtaggaacacagcccggtagagcggcgcagtggctcagcgaagctgggagaacgactgaaccggtcttgagattcatcatctcagcgtgcgtcagcgcgtcagcttcagcgtttgagaatggcacggactgacctgtcgtacatcccaaggaggcccgtgcgctatactcgccttgtggcctaatctgcgatcaacccatcctcaacgaaagcgcaagtagcgactaagcacactatctttcgggtcggtgcggtcacagtatcggcatctctgtctttagctacgatggtgtgcgtgtaactgatcagtacacccgctgtatcaaaactctatcttcaatccgctaagaatcgtcaccatcagtacatcagtacatcagtgggctaagatctaatggtgtcgttcgacggccgcgggcactagccacgagccaagagcggtacagttgctgcgaaatggtgggcagcctgacaggttcagtttgaataggatgaaaacgccatgaagaacagagaagctggcaattgacgatagtggggcgagcgcacgctgcttgctggtccgagcgtaggacgaacgacaaaccatgggcggggccaccaggccccagggagggcgtcactggttggatgtcgtctgttaggctagagctcaggcgctcagggcctctggcccaagcctcggacgcaagcctctgacgagcgagcgcgcgctggggcgggtctgcgcaggaacggcaggactgccgagttggttgaatattgaatggttggatgattggtttgctgggtttggttttgacacgcacggcacaggacaagtgagtttggaggttggatttgcgcaggtagaaagggcgctcggcctcagggcctcagcgtcagcagacgagctcgccagtccaggtcagtacccagtgttcgttacttcccaccgtccagagtttgctgctgcctctcagcttgattcgtgtcggagaagtagaaatggtcacagcgtaccacacactgtccccatgcctgcgtcctgctccacgagtgtttagccacaaaaatttatggacaaccttactgagcctgtgctggggggtgctttagcaccagcactggcgccatggcgtcaaggttaattccactgtcattcgacaaccttcaactgatgggggcaactgggcacaaaaccttggatatataaccaactccaactcccacggttttttaccttttgctcttctccccaggactcactacttctactcctctattcatcttcaccaaaatgaaggcggcggtgcttcattctgagaatcacttcatttatgaagaaattgatattgctccttgtcaagatgatgaggttaaaatcaaagtcattgcgactggaatttgtggatcggacacgcacaagatgacaggcaaatggaaatatcctctccccgccgtgatgggacacgagttctccggatatatcgttgagaaaggaaagaacgtcactaatgcagccatcggtgaccgcgtcgtggcgatccctttcctcccgtgtaacgactgtgagtattgtaaacgtggccaatttagcctttgcgaagaccacggtatggtcggctcgaagtccttcggaggttttgctgagtacgttaatattgagtcttcgaatgtccttcccatcggagatatggaatttgaagaggcggccatgattgagccgctcgcggtggcccttcatggagtcttgaatattcatccgcgtgttggcgacgtcgcggccgtgttcggtgtcggtaccattggtatgctgaccatccagtggctgaaaattgcgggtgccaaggagatcatcgcaatcgacttgtcggatgaaaaacttgctgacgcgcgtgctatgggttgtgaacgtacgatcaatcccctgaacgaagaccttcttgaaaaaatcaacgaatacaccaacggaatgggagttgacatcgccttcgagtgtgctggctcgaagattacacaagaacagtgccttcttatcacccgcaagcaaggcaaaattggatacctgggcattgcttattccgatgtccacctgtctgagaaggctttcgagaacatttttcgacgcgagcttacgttgaaaggtttctggaattcgtattccgctccatttccgggtgaagaatggacaaaatcgattgaattcattaaaaacggccgcattaagttgaaggaactgatctctcaccgatttaagctggaggatacacaaaaagcatttgatatgatgatcaaccgtgaagagaaatatggtaaggttttgattcttccgaacgaggagtaacacggatcaacaaaaatgtgcgccagctttgttgtgtgcccttttcctctagcggatcctatccacatttcgtgaatgaaccgattaagctctgacgagatttccttgttttctgtagatacctcttgtagaggtgtcaaagttatgttgtgatcgagagagttacctgcaaggtattatgcaagcggcttgatgaggacactcaactacgtgtgagtaggagtgcgttgctcagcagttgacgcgtgagccgcttgagcagcttgataaaggtcctaatcgtcttccagctgttggcagacgacaatgtgctgtagtagtaggataggcccgtaaaagtgtagaagcaataggttgagactgactgtaatgggtacttgcgttcaaagactgaaagtccaaaggattgctcaaaggcccctgaggtctgagcctctgagcgcgctcttcgtcaaaattcgccggggccatcggtcatcctctcgagggcagcatcttcctgcttgaagactgagtccgtctcagataacttcgtataatgtatgctatacgaagttatcctgcaggagctcagaccttgcatgttagccttgaccttgcctctatgaccactaattcgcacaagattgcacgttaccattgtcatcttgccatgtatccaatgtttcctgtttgccatagtacgtagtagatacatcgatcatcgatgcagatgacgcagatggcattggttcgctttgccctatgcatgcatcatgcatcatgcatcatgcgtcatgcgtcactatccatattaatcattgccctctgtactaggccatgacacctgcagacccttccccagggatgcttcttgtaatagccaatatactacacaactttaccgattacgatcgagatcgatctcactatagtttgtcgaacttcgatgcacatcgagggtgcggaaaaaagctgacggaagcggaagtgggtgaattggttaatttagttagattggcagggttgttcccaagattcaacgcaagctgagaaagaaaacagaaacacgaggcataaggccagtcagaaaatgcattacgaggggagttgaagtgactgtgggccagtgcctgggtcgtcatgtgcaaattttttcttcggttagactgccgcagcatgcagcaactctgccggccctatataactagtgcttcatcttcttgtcattcttgtctctttaccaacacaccggtactctttcaccatgggtaaggaaaagacacacgtatcgcgaccccgactcaactccaacatggacgcagacctgtacggatacaaatgggctcgagataatgtcggacagtcgggtgcgacgatctacagactctatggaaaaccggacgcccccgagctctttcttaaacacggcaagggtagcgttgcaaacgacgtaaccgacgaaatggtccgtctgaattggctaactgagttcatgccactccccaccatcaagcacttcatccgtacacctgacgatgcgtggctgttgactacggccatccccggtaagaccgcttttcaggtcctcgaggaataccctgactcgggcgagaacatcgtggatgccttggctgtgtttttgcgccgccttcactctattccggtctgcaactgccctttcaacagcgaccgtgtttttaggcttgcccaggcacaatcacgcatgaacaatggtctagtcgacgctagtgatttcgatgacgagcgcaacggctggccggtggaacaagtgtggaaagagatgcataagctcctgcccttttccccagactctgtcgtgacgcatggtgatttctcgcttgacaacctcatctttgacgagggcaagctcattggctgcattgacgtcggccgggttggcatcgccgatcgctaccaagatcttgcgatcctctggaattgtctgggcgagttctcccctagcctccagaagcgtctgttccagaaatatgggatcg

SEQ ID NO: 73 - DNA, 4579 bp, synthetic construct
  source 1..4579: mol_type = other DNA
tgcagagccttgcaaatgatgaaagaccaatggaattgatcattgattattgatgatgcatgatgaaagagatagaaacagatgcaagatgggatggcgcgatgatcaaatgataatgaacgttcaacccttcaaaattgaaactctcaggctgagcggctgagcaagctctgagaatgtgggtcttcgaagactttcgcttgagcatggtgcatgtgcaaagagatggaatgtggaattgttgtaggtaggaacacagcccggtagagcggcgcagtggctcagcgaagctgggagaacgactgaaccggtcttgagattcatcatctcagcgtgcgtcagcgcgtcagcttcagcgtttgagaatggcacggactgacctgtcgtacatcccaaggaggcccgtgcgctatactcgccttgtggcctaatctgcgatcaacccatcctcaacgaaagcgcaagtagcgactaagcacactatctttcgggtcggtgcggtcacagtatcggcatctctgtctttagctacgatggtgtgcgtgtaactgatcagtacacccgctgtatcaaaactctatcttcaatccgctaagaatcgtcaccatcagtacatcagtacatcagtgggctaagatctaatggtgtcgttcgacggccgcgggcactagccacgagccaagagcggtacagttgctgcgaaatggtgggcagcctgacaggttcagtttgaataggatgaaaacgccatgaagaacagagaagctggcaattgacgatagtggggcgagcgcacgctgcttgctggtccgagcgtaggacgaacgacaaaccatgggcggggccaccaggccccagggagggcgtcactggttggatgtcgtctgttaggctagagctcaggcgctcagggcctctggcccaagcctcggacgcaagcctctgacgagcgagcgcgcgctggggcgggtctgcgcaggaacggcaggactgccgagttggttgaatattgaatggttggatgattggtttgctgggtttggttttgacacgcacggcacaggacaagtgagtttggaggttggatttgcgcaggtagaaagggcgctcggcctcagggcctcagcgtcagcagacgagctcgccagtccaggtcagtacccagtgttcgttacttcccaccgtccagagtttgctgctgcctctcagcttgattcgtgtcggagaagtagaaatggtcacagcgtaccacacactgtccccatgcctgcgtcctgctccacgagtgtttagccacaaaaatttatggacaaccttactgagcctgtgctggggggtgctttagcaccagcactggcgccatggcgtcaaggttaattccactgtcattcgacaaccttcaactgatgggggcaactgggcacaaaaccttggatatataaccaactccaactcccacggttttttaccttttgctcttctccccaggactcactacttctactcctctattcatcttcaccaaaatgaaggccgcggtcctgcactccgaaaatgagattatttaccaggacattgaaatttccgagtgtcaaccaaacgaagtgaaagttaaggtcatggcggctggaatctgtggttccgatacccataaaatggtgagcaaatggaaataccccctccctgcgatcatgggtcacgaatttgccggctacgtcgttgaaaaaggcaaagacgtgacgaacgtcgaaattggcgatcgtgttgccgctatcccgttcatcccatgcaacgagtgtgagtattgcctgcgaggtcagttcagcctttgcgaaaatcacggaatgatcggcagcaagtcctttggcgcatttgccgagtttgttaatattccagctaagaacgttctcccgattggcgaaatgtctttcgaagatgcagctatgatcgaaccgtctgcggtcagcctgcatggagtgctcaacattcacccacagctcggcgatgtcgttgctgtcttcggtgtgggaactattggaatcctcgcaattcagtggttgcgtgtcgccggcgtgaaagagattattgctattgacatttccgacaagaagctccaggacgctatggatctgggttgtgagaagtcgattaaccctttgaaggaagacttgattaagaaaatttatgaatacacgaatggcctcggcgttgacatcgcatttgaatgcgctggatctaaaattacgcaagaacagtgcctgctcattacccgtaaacaaggaaaggttggttatttgggaattgcgtacagcgatgttactctctctgaaaaagcctttgaaaatattttccgccgagagctcactctcaagggtttctggaattcgtattccgcgccgtttccaggaaaggagtggatgaacacgatcgagttcgtccaacagggcaaaattaagcttaaagaattggtgtcgcatcgctacaagctcgaagacacccagaaggcgtttaacatgatgatcaaccgagaagaagaatacaataaggtgatgatcatccccaacgaggaactggagtaacacggatcaacaaaaatgtgcgccagctttgttgtgtgcccttttcctctagcggatcctatccacatttcgtgaatgaaccgattaagctctgacgagatttccttgttttctgtagatacctcttgtagaggtgtcaaagttatgttgtgatcgagagagttacctgcaaggtattatgcaagcggcttgatgaggacactcaactacgtgtgagtaggagtgcgttgctcagcagttgacgcgtgagccgcttgagcagcttgataaaggtcctaatcgtcttccagctgttggcagacgacaatgtgctgtagtagtaggataggcccgtaaaagtgtagaagcaataggttgagactgactgtaatgggtacttgcgttcaaagactgaaagtccaaaggattgctcaaaggcccctgaggtctgagcctctgagcgcgctcttcgtcaaaattcgccggggccatcggtcatcctctcgagggcagcatcttcctgcttgaagactgagtccgtctcagataacttcgtataatgtatgctatacgaagttatcctgcaggagctcagaccttgcatgttagccttgaccttgcctctatgaccactaattcgcacaagattgcacgttaccattgtcatcttgccatgtatccaatgtttcctgtttgccatagtacgtagtagatacatcgatcatcgatgcagatgacgcagatggcattggttcgctttgccctatgcatgcatcatgcatcatgcatcatgcgtcatgcgtcactatccatattaatcattgccctctgtactaggccatgacacctgcagacccttccccagggatgcttcttgtaatagccaatatactacacaactttaccgattacgatcgagatcgatctcactatagtttgtcgaacttcgatgcacatcgagggtgcggaaaaaagctgacggaagcggaagtgggtgaattggttaatttagttagattggcagggttgttcccaagattcaacgcaagctgagaaagaaaacagaaacacgaggcataaggccagtcagaaaatgcattacgaggggagttgaagtgactgtgggccagtgcctgggtcgtcatgtgcaaattttttcttcggttagactgccgcagcatgcagcaactctgccggccctatataactagtgcttcatcttcttgtcattcttgtctctttaccaacacaccggtactctttcaccatgggtaaggaaaagacacacgtatcgcgaccccgactcaactccaacatggacgcagacctgtacggatacaaatgggctcgagataatgtcggacagtcgggtgcgacgatctacagactctatggaaaaccggacgcccccgagctctttcttaaacacggcaagggtagcgttgcaaacgacgtaaccgacgaaatggtccgtctgaattggctaactgagttcatgccactccccaccatcaagcacttcatccgtacacctgacgatgcgtggctgttgactacggccatccccggtaagaccgcttttcaggtcctcgaggaataccctgactcgggcgagaacatcgtggatgccttggctgtgtttttgcgccgccttcactctattccggtctgcaactgccctttcaacagcgaccgtgtttttaggcttgcccaggcacaatcacgcatgaacaatggtctagtcgacgctagtgatttcgatgacgagcgcaacggctggccggtggaacaagtgtggaaagagatgcataagctcctgcccttttccccagactctgtcgtgacgcatggtgatttctcgcttgacaacctcatctttgacgagggcaagctcattggctgcattgacgtcggccgggttggcatcgccgatcgctaccaagatcttgcgatcctctggaattgtctgggcgagttctcccctagcctccagaagcgtctgttccagaaatatgggatcg

SEQ ID NO: 74 - DNA, 4567 bp, synthetic construct
  source 1..4567: mol_type = other DNA
tgcagagccttgcaaatgatgaaagaccaatggaattgatcattgattattgatgatgcatgatgaaagagatagaaacagatgcaagatgggatggcgcgatgatcaaatgataatgaacgttcaacccttcaaaattgaaactctcaggctgagcggctgagcaagctctgagaatgtgggtcttcgaagactttcgcttgagcatggtgcatgtgcaaagagatggaatgtggaattgttgtaggtaggaacacagcccggtagagcggcgcagtggctcagcgaagctgggagaacgactgaaccggtcttgagattcatcatctcagcgtgcgtcagcgcgtcagcttcagcgtttgagaatggcacggactgacctgtcgtacatcccaaggaggcccgtgcgctatactcgccttgtggcctaatctgcgatcaacccatcctcaacgaaagcgcaagtagcgactaagcacactatctttcgggtcggtgcggtcacagtatcggcatctctgtctttagctacgatggtgtgcgtgtaactgatcagtacacccgctgtatcaaaactctatcttcaatccgctaagaatcgtcaccatcagtacatcagtacatcagtgggctaagatctaatggtgtcgttcgacggccgcgggcactagccacgagccaagagcggtacagttgctgcgaaatggtgggcagcctgacaggttcagtttgaataggatgaaaacgccatgaagaacagagaagctggcaattgacgatagtggggcgagcgcacgctgcttgctggtccgagcgtaggacgaacgacaaaccatgggcggggccaccaggccccagggagggcgtcactggttggatgtcgtctgttaggctagagctcaggcgctcagggcctctggcccaagcctcggacgcaagcctctgacgagcgagcgcgcgctggggcgggtctgcgcaggaacggcaggactgccgagttggttgaatattgaatggttggatgattggtttgctgggtttggttttgacacgcacggcacaggacaagtgagtttggaggttggatttgcgcaggtagaaagggcgctcggcctcagggcctcagcgtcagcagacgagctcgccagtccaggtcagtacccagtgttcgttacttcccaccgtccagagtttgctgctgcctctcagcttgattcgtgtcggagaagtagaaatggtcacagcgtaccacacactgtccccatgcctgcgtcctgctccacgagtgtttagccacaaaaatttatggacaaccttactgagcctgtgctggggggtgctttagcaccagcactggcgccatggcgtcaaggttaattccactgtcattcgacaaccttcaactgatgggggcaactgggcacaaaaccttggatatataaccaactccaactcccacggttttttaccttttgctcttctccccaggactcactacttctactcctctattcatcttcaccaaaatgaaggcagcggtgcttcattcggtcggagacatccgctacgaaaacatcgagatcaagccttacggagacgatgaagtgaaaatcaaagttaaagccgccggtatctgtggatctgacccgccacgtgcactcaaaaagtggaaatatcccgtgccagccattttgggtcacgagttctcgggttatatcgttgaagtgggaaagaacgtgaagggttttaaagtgggagatcgtgtcgttgccgtccctctggaaccgtgtcaccaatgtgaatactgcaagaaaggccaattttcgctctgcgaaagctacgatatgttgggtgctacttcctttggcggttttgcagagtacgctaacgtgaaggcaacaaatgttttgaaaattgacgatatcgactatgaagaggcggccatgattgaacctctcgcagtcgcactgcatggtgtgcttaatatcaatccgcaactcggtgatactgttgctgttttgggagctggaacgatcggtcaactcacgattcaatggctcaaggtttcgggagtcgagaagattatcgcagtcgacatttcggacaaaaaaattagcgaagctatgtccttgggagcagatattggtattaatgctcttaaagagaatccggtcgaaaagatcatggaacttacaaacggtttcggcgtggatatctgcattgaatgcgccggctctaagatcactcaggaacaatgtctgttggtcacgaagaaaaaaggtaagattggatatcagggtatcggtcacgccggaattgagttgtctgaagttgctttcgagggtattttccgtaaagaattgaacatccaaggtttttggaatagctacagcgccccgttccccggacaggaatggttcaaaagcatcgagtatgttaagcagaaaaaaatcaagctcaaacagttgatcagccatcgcttcagccttgaagacacagcgaaagcttttgagatgattggtgaacgtaaggaggagtataacaagatcatgattgtccaggactaacacggatcaacaaaaatgtgcgccagctttgttgtgtgcccttttcctctagcggatcctatccacatttcgtgaatgaaccgattaagctctgacgagatttccttgttttctgtagatacctcttgtagaggtgtcaaagttatgttgtgatcgagagagttacctgcaaggtattatgcaagcggcttgatgaggacactcaactacgtgtgagtaggagtgcgttgctcagcagttgacgcgtgagccgcttgagcagcttgataaaggtcctaatcgtcttccagctgttggcagacgacaatgtgctgtagtagtaggataggcccgtaaaagtgtagaagcaataggttgagactgactgtaatgggtacttgcgttcaaagactgaaagtccaaaggattgctcaaaggcccctgaggtctgagcctctgagcgcgctcttcgtcaaaattcgccggggccatcggtcatcctctcgagggcagcatcttcctgcttgaagactgagtccgtctcagataacttcgtataatgtatgctatacgaagttatcctgcaggagctcagaccttgcatgttagccttgaccttgcctctatgaccactaattcgcacaagattgcacgttaccattgtcatcttgccatgtatccaatgtttcctgtttgccatagtacgtagtagatacatcgatcatcgatgcagatgacgcagatggcattggttcgctttgccctatgcatgcatcatgcatcatgcatcatgcgtcatgcgtcactatccatattaatcattgccctctgtactaggccatgacacctgcagacccttccccagggatgcttcttgtaatagccaatatactacacaactttaccgattacgatcgagatcgatctcactatagtttgtcgaacttcgatgcacatcgagggtgcggaaaaaagctgacggaagcggaagtgggtgaattggttaatttagttagattggcagggttgttcccaagattcaacgcaagctgagaaagaaaacagaaacacgaggcataaggccagtcagaaaatgcattacgaggggagttgaagtgactgtgggccagtgcctgggtcgtcatgtgcaaattttttcttcggttagactgccgcagcatgcagcaactctgccggccctatataactagtgcttcatcttcttgtcattcttgtctctttaccaacacaccggtactctttcaccatgggtaaggaaaagacacacgtatcgcgaccccgactcaactccaacatggacgcagacctgtacggatacaaatgggctcgagataatgtcggacagtcgggtgcgacgatctacagactctatggaaaaccggacgcccccgagctctttcttaaacacggcaagggtagcgttgcaaacgacgtaaccgacgaaatggtccgtctgaattggctaactgagttcatgccactccccaccatcaagcacttcatccgtacacctgacgatgcgtggctgttgactacggccatccccggtaagaccgcttttcaggtcctcgaggaataccctgactcgggcgagaacatcgtggatgccttggctgtgtttttgcgccgccttcactctattccggtctgcaactgccctttcaacagcgaccgtgtttttaggcttgcccaggcacaatcacgcatgaacaatggtctagtcgacgctagtgatttcgatgacgagcgcaacggctggccggtggaacaagtgtggaaagagatgcataagctcctgcccttttccccagactctgtcgtgacgcatggtgatttctcgcttgacaacctcatctttgacgagggcaagctcattggctgcattgacgtcggccgggttggcatcgccgatcgctaccaagatcttgcgatcctctggaattgtctgggcgagttctcccctagcctccagaagcgtctgttccagaaatatgggatcg

SEQ ID NO: 75 - DNA, 4573 bp, synthetic construct
  source 1..4573: mol_type = other DNA
tgcagagccttgcaaatgatgaaagaccaatggaattgatcattgattattgatgatgcatgatgaaagagatagaaacagatgcaagatgggatggcgcgatgatcaaatgataatgaacgttcaacccttcaaaattgaaactctcaggctgagcggctgagcaagctctgagaatgtgggtcttcgaagactttcgcttgagcatggtgcatgtgcaaagagatggaatgtggaattgttgtaggtaggaacacagcccggtagagcggcgcagtggctcagcgaagctgggagaacgactgaaccggtcttgagattcatcatctcagcgtgcgtcagcgcgtcagcttcagcgtttgagaatggcacggactgacctgtcgtacatcccaaggaggcccgtgcgctatactcgccttgtggcctaatctgcgatcaacccatcctcaacgaaagcgcaagtagcgactaagcacactatctttcgggtcggtgcggtcacagtatcggcatctctgtctttagctacgatggtgtgcgtgtaactgatcagtacacccgctgtatcaaaactctatcttcaatccgctaagaatcgtcaccatcagtacatcagtacatcagtgggctaagatctaatggtgtcgttcgacggccgcgggcactagccacgagccaagagcggtacagttgctgcgaaatggtgggcagcctgacaggttcagtttgaataggatgaaaacgccatgaagaacagagaagctggcaattgacgatagtggggcgagcgcacgctgcttgctggtccgagcgtaggacgaacgacaaaccatgggcggggccaccaggccccagggagggcgtcactggttggatgtcgtctgttaggctagagctcaggcgctcagggcctctggcccaagcctcggacgcaagcctctgacgagcgagcgcgcgctggggcgggtctgcgcaggaacggcaggactgccgagttggttgaatattgaatggttggatgattggtttgctgggtttggttttgacacgcacggcacaggacaagtgagtttggaggttggatttgcgcaggtagaaagggcgctcggcctcagggcctcagcgtcagcagacgagctcgccagtccaggtcagtacccagtgttcgttacttcccaccgtccagagtttgctgctgcctctcagcttgattcgtgtcggagaagtagaaatggtcacagcgtaccacacactgtccccatgcctgcgtcctgctccacgagtgtttagccacaaaaatttatggacaaccttactgagcctgtgctggggggtgctttagcaccagcactggcgccatggcgtcaaggttaattccactgtcattcgacaaccttcaactgatgggggcaactgggcacaaaaccttggatatataaccaactccaactcccacggttttttaccttttgctcttctccccaggactcactacttctactcctctattcatcttcaccaaaatgaaagcagcagttttgcattccgagaatcacttcatttatcaggatatggagagcttcgagtgccagaatgacgaagtcaagatcaaggttatggctgccggcatctgcggaagcgatacgcataaaatggtttcgaaatggaaatatcccttgcctgcaattatgggacatgagttctccggttacgtcgtcgaaaagggtagcgatgtggcaaacgtcgagatcggcgaccgagtggttgccattccattcttgccctgtcacacttgtgagtattgcaagtccggtgtttattctttgtgtgaagatcacggtatgatcggttccaagagctacggtggcttcgcggagtatgtcaatctcaaggcaaccaacgtccttccaattggaaacatggattttgaggaggccgctatgatcgaaccgcttgcagtcgccctccacggcgttctccatattcagccgcgtctcggtgacgtggccgccgtttttggagtcggcaccattggcatgttggccatccaatggctgaagattgcgggagtgaaagaaattatcgctattgatatttcggatgagaagttggcggaagcgaaagccatgggatgcgaacgaacgattaatcccctccaagacaatctcatcgaaaaggtccacgagtataccaacggcttgggcgtggatgtcgccctcgagtgcgcgggatctaagattacacaggaacaatgtcttttgatcactcgcaaaaagggtgaaattggttacttgggaatcgcgtattctaatgtggttttgagcgaacaagcttttgagaacatctttcgtaaagagcttacgttgaagggtttttggaattgttatagcgctcccttccctggcgaggagtggacgaaatctatcgacttcattctgaagggccgcatcaagctgaaggagcttatcagccaccgctttcccctggaagaaacgcagaaggcattcgacctgatgattaatcgaaaagaaacctatggtaaggtgatgatcatccccaataaggaataacacggatcaacaaaaatgtgcgccagctttgttgtgtgcccttttcctctagcggatcctatccacatttcgtgaatgaaccgattaagctctgacgagatttccttgttttctgtagatacctcttgtagaggtgtcaaagttatgttgtgatcgagagagttacctgcaaggtattatgcaagcggcttgatgaggacactcaactacgtgtgagtaggagtgcgttgctcagcagttgacgcgtgagccgcttgagcagcttgataaaggtcctaatcgtcttccagctgttggcagacgacaatgtgctgtagtagtaggataggcccgtaaaagtgtagaagcaataggttgagactgactgtaatgggtacttgcgttcaaagactgaaagtccaaaggattgctcaaaggcccctgaggtctgagcctctgagcgcgctcttcgtcaaaattcgccggggccatcggtcatcctctcgagggcagcatcttcctgcttgaagactgagtccgtctcagataacttcgtataatgtatgctatacgaagttatcctgcaggagctcagaccttgcatgttagccttgaccttgcctctatgaccactaattcgcacaagattgcacgttaccattgtcatcttgccatgtatccaatgtttcctgtttgccatagtacgtagtagatacatcgatcatcgatgcagatgacgcagatggcattggttcgctttgccctatgcatgcatcatgcatcatgcatcatgcgtcatgcgtcactatccatattaatcattgccctctgtactaggccatgacacctgcagacccttccccagggatgcttcttgtaatagccaatatactacacaactttaccgattacgatcgagatcgatctcactatagtttgtcgaacttcgatgcacatcgagggtgcggaaaaaagctgacggaagcggaagtgggtgaattggttaatttagttagattggcagggttgttcccaagattcaacgcaagctgagaaagaaaacagaaacacgaggcataaggccagtcagaaaatgcattacgaggggagttgaagtgactgtgggccagtgcctgggtcgtcatgtgcaaattttttcttcggttagactgccgcagcatgcagcaactctgccggccctatataactagtgcttcatcttcttgtcattcttgtctctttaccaacacaccggtactctttcaccatgggtaaggaaaagacacacgtatcgcgaccccgactcaactccaacatggacgcagacctgtacggatacaaatgggctcgagataatgtcggacagtcgggtgcgacgatctacagactctatggaaaaccggacgcccccgagctctttcttaaacacggcaagggtagcgttgcaaacgacgtaaccgacgaaatggtccgtctgaattggctaactgagttcatgccactccccaccatcaagcacttcatccgtacacctgacgatgcgtggctgttgactacggccatccccggtaagaccgcttttcaggtcctcgaggaataccctgactcgggcgagaacatcgtggatgccttggctgtgtttttgcgccgccttcactctattccggtctgcaactgccctttcaacagcgaccgtgtttttaggcttgcccaggcacaatcacgcatgaacaatggtctagtcgacgctagtgatttcgatgacgagcgcaacggctggccggtggaacaagtgtggaaagagatgcataagctcctgcccttttccccagactctgtcgtgacgcatggtgatttctcgcttgacaacctcatctttgacgagggcaagctcattggctgcattgacgtcggccgggttggcatcgccgatcgctaccaagatcttgcgatcctctggaattgtctgggcgagttctcccctagcctccagaagcgtctgttccagaaatatgggatcg

SEQ ID NO: 76 - DNA, 4573 bp, synthetic construct
  source 1..4573: mol_type = other DNA
tgcagagccttgcaaatgatgaaagaccaatggaattgatcattgattattgatgatgcatgatgaaagagatagaaacagatgcaagatgggatggcgcgatgatcaaatgataatgaacgttcaacccttcaaaattgaaactctcaggctgagcggctgagcaagctctgagaatgtgggtcttcgaagactttcgcttgagcatggtgcatgtgcaaagagatggaatgtggaattgttgtaggtaggaacacagcccggtagagcggcgcagtggctcagcgaagctgggagaacgactgaaccggtcttgagattcatcatctcagcgtgcgtcagcgcgtcagcttcagcgtttgagaatggcacggactgacctgtcgtacatcccaaggaggcccgtgcgctatactcgccttgtggcctaatctgcgatcaacccatcctcaacgaaagcgcaagtagcgactaagcacactatctttcgggtcggtgcggtcacagtatcggcatctctgtctttagctacgatggtgtgcgtgtaactgatcagtacacccgctgtatcaaaactctatcttcaatccgctaagaatcgtcaccatcagtacatcagtacatcagtgggctaagatctaatggtgtcgttcgacggccgcgggcactagccacgagccaagagcggtacagttgctgcgaaatggtgggcagcctgacaggttcagtttgaataggatgaaaacgccatgaagaacagagaagctggcaattgacgatagtggggcgagcgcacgctgcttgctggtccgagcgtaggacgaacgacaaaccatgggcggggccaccaggccccagggagggcgtcactggttggatgtcgtctgttaggctagagctcaggcgctcagggcctctggcccaagcctcggacgcaagcctctgacgagcgagcgcgcgctggggcgggtctgcgcaggaacggcaggactgccgagttggttgaatattgaatggttggatgattggtttgctgggtttggttttgacacgcacggcacaggacaagtgagtttggaggttggatttgcgcaggtagaaagggcgctcggcctcagggcctcagcgtcagcagacgagctcgccagtccaggtcagtacccagtgttcgttacttcccaccgtccagagtttgctgctgcctctcagcttgattcgtgtcggagaagtagaaatggtcacagcgtaccacacactgtccccatgcctgcgtcctgctccacgagtgtttagccacaaaaatttatggacaaccttactgagcctgtgctggggggtgctttagcaccagcactggcgccatggcgtcaaggttaattccactgtcattcgacaaccttcaactgatgggggcaactgggcacaaaaccttggatatataaccaactccaactcccacggttttttaccttttgctcttctccccaggactcactacttctactcctctattcatcttcaccaaaatgaaagcagcagtgctccattctgagaatcagatcgtgtttcaagaatttgagatcggcgaacttaagccagacgaagttaaggtcaaagtgatggcagcgggcatctgtggctcggatacccacaagatggtgtcgaagtggaagtatcccttgccagcaatcatgggtcatgagtttgccggctatattgtcgaaaagggaaaagatgtggtgcatgtggaagtcggtgatcgtgtggcaggcatcccttttgtgccttgtaatgactgtgagtactgttttcgcggtcagttttccctttgcgagaatcacggtatggtgggttctaagtctttcggagcctttgcggaatatgttaacattccagccaaaaacgtgctgccgattggagacatggattttgaggacgcggcgatgattgagccttcggccgttgccctccatggagtcttgaacattcacccccaaatcggtgatgttgtggcggtttttggagttggcaccattggaatccttgcactccagtggttgaaagttgccggtgttaaagaaattattgccattgacatctcggacaagaagctccaggatgccatcgccctcggatgtgagcgcacgattaatccattgaaagagaatttgctggaaaaaattcatgagtatacgaatggtcttggagtggacatcgccattgaatgtgcgggcagcaagattacacaagaacagtgtcttcttattacgcgcaagcagggcaaagtcggctatcttggcatcgcttactccgatattaatctgtcggaaaaagcatttgaaaacatcttccgccgcgaactcaaaattaatggtttctggaattcttattcggctccgttcccaggtaaagagtggacaaacaccgtggagtatgtgaagcaaggcaagattaagctgaaggagcttatttcccaccgattcggactggaagacacgcagcaagcatttaatatgattatcaaccgagaggaggaatataataaagttatgattgtcccaaacggcgagtaacacggatcaacaaaaatgtgcgccagctttgttgtgtgcccttttcctctagcggatcctatccacatttcgtgaatgaaccgattaagctctgacgagatttccttgttttctgtagatacctcttgtagaggtgtcaaagttatgttgtgatcgagagagttacctgcaaggtattatgcaagcggcttgatgaggacactcaactacgtgtgagtaggagtgcgttgctcagcagttgacgcgtgagccgcttgagcagcttgataaaggtcctaatcgtcttccagctgttggcagacgacaatgtgctgtagtagtaggataggcccgtaaaagtgtagaagcaataggttgagactgactgtaatgggtacttgcgttcaaagactgaaagtccaaaggattgctcaaaggcccctgaggtctgagcctctgagcgcgctcttcgtcaaaattcgccggggccatcggtcatcctctcgagggcagcatcttcctgcttgaagactgagtccgtctcagataacttcgtataatgtatgctatacgaagttatcctgcaggagctcagaccttgcatgttagccttgaccttgcctctatgaccactaattcgcacaagattgcacgttaccattgtcatcttgccatgtatccaatgtttcctgtttgccatagtacgtagtagatacatcgatcatcgatgcagatgacgcagatggcattggttcgctttgccctatgcatgcatcatgcatcatgcatcatgcgtcatgcgtcactatccatattaatcattgccctctgtactaggccatgacacctgcagacccttccccagggatgcttcttgtaatagccaatatactacacaactttaccgattacgatcgagatcgatctcactatagtttgtcgaacttcgatgcacatcgagggtgcggaaaaaagctgacggaagcggaagtgggtgaattggttaatttagttagattggcagggttgttcccaagattcaacgcaagctgagaaagaaaacagaaacacgaggcataaggccagtcagaaaatgcattacgaggggagttgaagtgactgtgggccagtgcctgggtcgtcatgtgcaaattttttcttcggttagactgccgcagcatgcagcaactctgccggccctatataactagtgcttcatcttcttgtcattcttgtctctttaccaacacaccggtactctttcaccatgggtaaggaaaagacacacgtatcgcgaccccgactcaactccaacatggacgcagacctgtacggatacaaatgggctcgagataatgtcggacagtcgggtgcgacgatctacagactctatggaaaaccggacgcccccgagctctttcttaaacacggcaagggtagcgttgcaaacgacgtaaccgacgaaatggtccgtctgaattggctaactgagttcatgccactccccaccatcaagcacttcatccgtacacctgacgatgcgtggctgttgactacggccatccccggtaagaccgcttttcaggtcctcgaggaataccctgactcgggcgagaacatcgtggatgccttggctgtgtttttgcgccgccttcactctattccggtctgcaactgccctttcaacagcgaccgtgtttttaggcttgcccaggcacaatcacgcatgaacaatggtctagtcgacgctagtgatttcgatgacgagcgcaacggctggccggtggaacaagtgtggaaagagatgcataagctcctgcccttttccccagactctgtcgtgacgcatggtgatttctcgcttgacaacctcatctttgacgagggcaagctcattggctgcattgacgtcggccgggttggcatcgccgatcgctaccaagatcttgcgatcctctggaattgtctgggcgagttctcccctagcctccagaagcgtctgttccagaaatatgggatcg

SEQ ID NO: 77 - DNA, 4533 bp, synthetic construct
  source 1..4533: mol_type = other DNA
tgcagagccttgcaaatgatgaaagaccaatggaattgatcattgattattgatgatgcatgatgaaagagatagaaacagatgcaagatgggatggcgcgatgatcaaatgataatgaacgttcaacccttcaaaattgaaactctcaggctgagcggctgagcaagctctgagaatgtgggtcttcgaagactttcgcttgagcatggtgcatgtgcaaagagatggaatgtggaattgttgtaggtaggaacacagcccggtagagcggcgcagtggctcagcgaagctgggagaacgactgaaccggtcttgagattcatcatctcagcgtgcgtcagcgcgtcagcttcagcgtttgagaatggcacggactgacctgtcgtacatcccaaggaggcccgtgcgctatactcgccttgtggcctaatctgcgatcaacccatcctcaacgaaagcgcaagtagcgactaagcacactatctttcgggtcggtgcggtcatttagctacgatggtgtgcgtgtaactgatcagtacacccgctgtatcaaaactctatcttcaatccgctaagaatcgtcaccatcagtacatcagtacatcagtgggctaagatctaatggtgtcgttcgacggccgcgggcactagccacgagccaagagcggtacagttgctgcgaaatggtgggcagcctgacaggttcagtttgaataggatgaaaacgccatgaagaacagagaagctggcaattgacgatagtggggcgagcgcacgctgcttgctggtccgagcgtaggacgaacgacaaaccatgggcggggccaccaggccccagggagggcgtcactggttggatgtcgtctgttaggctagagctcaggcgctcagggcctctggcccaagcctcggacgcaagcctctgacgagcgagcgcgcgctggggcgggtctgcgcaggaacggcaggactgccgagttggttgaatattgaatggttggatgattggtttgctgggtttggttttgacacgcacggcacaggacaagtgagtttggaggttggatttgcgcaggtagaaagggcgctcggcctcagggcctcagcgtcagcagacgagctcgccagtccaggtcagtacccagtgttcgttacttcccaccgtccagagtttgctgctgcctctcagcttgattcgtgtcggagaagtagaaatggtcacagcgtaccacacactgtccccatgcctgcgtcctgctccacgagtgtttagccacaaaaatttatggacaaccttactgagcctgtgctggggggtgctttagcaccagcactggcgccatggcgtcaaggttaattccactgtcattcgacaaccttcaactgatgggggcaactgggcacaaaaccttggatatataaccaactccaactcccacggttttttaccttttgctcttctccccaggactcactacttctactcctctattcatcttcaccaaaatgattaatcaggtttaccagctggtggcgccgcgccagttcgacgtcacgtataataacgtggacatttacggcaaccacgttatcgtccgaccgctgtatctctcgatctgcgcggccgatcaacgatactataccggacgtcgtgatgagaatgtgctgcgaaaaaaattgccaatgtctctggtccatgaagccgttggtgaggttgtttttgatagcaagggagtgtttgagaagggcacaaaggttgttatggtcccaaatacgcctacggagcaacaccatattatcgccgagaactacctggcgtcttcgtatttccgctcgagcggttacgatggtttcatgcaggattatgttgttatggcgcatgaccgtattgtcccgctgcccaacgatattgacctgagcactatttcctatacagaattggtttcggttagctaccacgccattcaacgtttcgagcgtaagtccattccgctcaagaatagcttcggtatttggggagacggtaatttgggctacatcactgcaatccttcttcgcaagctctacccggaggcaaaaatttatgtcttcggaaaaacggattataaactttctcatttcagcttcgttgatgacatcttcacggtgaaccaaatccccgatgatttgaagattgaccacgccttcgagtgcgttggcggaaagggctcgcaagttgcgttgcagcaaatcgttgagcatatctcccctgaaggttctattgctctcttgggcgtgtccgaactccccgtcgaagttaacacccgactcgtgttggaaaagggcttgaccctgattggatcctctcgttccggttccaaggactttgagcaggttgtcgacctctatcgaaaatatcccgatattgtcgagaaactcgcacttttgaaaggccacgaaattaatgtttgtacacttcaggatatcgtgcaggcatttgaaatggacctctctacgtcttggggcaagacagttttgaagtggacgatctaacacggatcaacaaaaatgtgcgccagctttgttgtgtgcccttttcctctagcggatcctatccacatttcgtgaatgaaccgattaagctctgacgagatttccttgttttctgtagatacctcttgtagaggtgtcaaagttatgttgtgatcgagagagttacctgcaaggtattatgcaagcggcttgatgaggacactcaactacgtgtgagtaggagtgcgttgctcagcagttgacgcgtgagccgcttgagcagcttgataaaggtcctaatcgtcttccagctgttggcagacgacaatgtgctgtagtagtaggataggcccgtaaaagtgtagaagcaataggttgagactgactgtaatgggtacttgcgttcaaagactgaaagtccaaaggattgctcaaaggcccctgaggtctgagcctctgagcgcgctcttcgtcaaaattcgccggggccatcggtcatcctctcgagggcagcatcttcctgcttgaagactgagtccgtctcagataacttcgtataatgtatgctatacgaagttatcctgcaggagctcagaccttgcatgttagccttgaccttgcctctatgaccactaattcgcacaagattgcacgttaccattgtcatcttgccatgtatccaatgtttcctgtttgccatagtacgtagtagatacatcgatcatcgatgcagatgacgcagatggcattggttcgctttgccctatgcatgcatcatgcatcatgcatcatgcgtcatgcgtcactatccatattaatcattgccctctgtactaggccatgacacctgcagacccttccccagggatgcttcttgtaatagccaatatactacacaactttaccgattacgatcgagatcgatctcactatagtttgtcgaacttcgatgcacatcgagggtgcggaaaaaagctgacggaagcggaagtgggtgaattggttaatttagttagattggcagggttgttcccaagattcaacgcaagctgagaaagaaaacagaaacacgaggcataaggccagtcagaaaatgcattacgaggggagttgaagtgactgtgggccagtgcctgggtcgtcatgtgcaaattttttcttcggttagactgccgcagcatgcagcaactctgccggccctatataactagtgcttcatcttcttgtcattcttgtctctttaccaacacaccggtactctttcaccatgggtaaggaaaagacacacgtatcgcgaccccgactcaactccaacatggacgcagacctgtacggatacaaatgggctcgagataatgtcggacagtcgggtgcgacgatctacagactctatggaaaaccggacgcccccgagctctttcttaaacacggcaagggtagcgttgcaaacgacgtaaccgacgaaatggtccgtctgaattggctaactgagttcatgccactccccaccatcaagcacttcatccgtacacctgacgatgcgtggctgttgactacggccatccccggtaagaccgcttttcaggtcctcgaggaataccctgactcgggcgagaacatcgtggatgccttggctgtgtttttgcgccgccttcactctattccggtctgcaactgccctttcaacagcgaccgtgtttttaggcttgcccaggcacaatcacgcatgaacaatggtctagtcgacgctagtgatttcgatgacgagcgcaacggctggccggtggaacaagtgtggaaagagatgcataagctcctgcccttttccccagactctgtcgtgacgcatggtgatttctcgcttgacaacctcatctttgacgagggcaagctcattggctgcattgacgtcggccgggttggcatcgccgatcgctaccaagatcttgcgatcctctggaattgtctgggcgagttctcccctagcctccagaagcgtctgttccagaaatatgggatcg

SEQ ID NO: 78 - DNA, 4633 bp, synthetic construct
  source 1..4633: mol_type = other DNA
tgcagagccttgcaaatgatgaaagaccaatggaattgatcattgattattgatgatgcatgatgaaagagatagaaacagatgcaagatgggatggcgcgatgatcaaatgataatgaacgttcaacccttcaaaattgaaactctcaggctgagcggctgagcaagctctgagaatgtgggtcttcgaagactttcgcttgagcatggtgcatgtgcaaagagatggaatgtggaattgttgtaggtaggaacacagcccggtagagcggcgcagtggctcagcgaagctgggagaacgactgaaccggtcttgagattcatcatctcagcgtgcgtcagcgcgtcagcttcagcgtttgagaatggcacggactgacctgtcgtacatcccaaggaggcccgtgcgctatactcgccttgtggcctaatctgcgatcaacccatcctcaacgaaagcgcaagtagcgactaagcacactatctttcgggtcggtgcggtcacagtatcggcatctctgtctttagctacgatggtgtgcgtgtaactgatcagtacacccgctgtatcaaaactctatcttcaatccgctaagaatcgtcaccatcagtacatcagtacatcagtgggctaagatctaatggtgtcgttcgacggccgcgggcactagccacgagccaagagcggtacagttgctgcgaaatggtgggcagcctgacaggttcagtttgaataggatgaaaacgccatgaagaacagagaagctggcaattgacgatagtggggcgagcgcacgctgcttgctggtccgagcgtaggacgaacgacaaaccatgggcggggccaccaggccccagggagggcgtcactggttggatgtcgtctgttaggctagagctcaggcgctcagggcctctggcccaagcctcggacgcaagcctctgacgagcgagcgcgcgctggggcgggtctgcgcaggaacggcaggactgccgagttggttgaatattgaatggttggatgattggtttgctgggtttggttttgacacgcacggcacaggacaagtgagtttggaggttggatttgcgcaggtagaaagggcgctcggcctcagggcctcagcgtcagcagacgagctcgccagtccaggtcagtacccagtgttcgttacttcccaccgtccagagtttgctgctgcctctcagcttgattcgtgtcggagaagtagaaatggtcacagcgtaccacacactgtccccatgcctgcgtcctgctccacgagtgtttagccacaaaaatttatggacaaccttactgagcctgtgctggggggtgctttagcaccagcactggcgccatggcgtcaaggttaattccactgtcattcgacaaccttcaactgatgggggcaactgggcacaaaaccttggatatataaccaactccaactcccacggttttttaccttttgctcttctccccaggactcactacttctactcctctattcatcttcaccaaaatgtgagacctaatatcactgctgtacagacaagactgtgtatattaggtctcaatgttgttgtttgaagttgttctcccaatgatcaaccaagtttatcaacttgtcgcaccccgccaatttgaggtgacgtacaataacgtggacatttacagcgactatgttattgtccgacctctttacatgagcatttgcgctgccgaccagcgatactacaccggatcgcgtgacgagaatgtcctttcccaaaaactgcctatgtctctcattcacgaaggagtgggtgaggttgttttcgattccaagggagtctttaataagggcactaaggtggttatggtccccaatacaccgaccgagaaagacgacgtgattgcagagaattatcttaaaagctcgtattttcgttcctccggccatgacggtttcatgcaggacttcgttctccttaatcacgatcgagctgtcccgctgccggacgacatcgatctctccatcatttcctacacagagttggtgacagtttctctccatgccatccgccgatttgaaaaaaaatccatcagcaataaaaacaccttcggcatttggggagacggaaatcttggttatattaccgcaattctcctgcgcaagctctacccagaatctaaaatttacgtgtttggtaaaactgattataaactgagccatttctccttcgtggacgacgttttcttcatcaataagattcctgaaggacttacctttgatcacgcctttgagtgcgtcggtggacgaggctctcaatccgcaattaaccaaatgattgactatatttcgcccgaaggtagcatcgccttgctcggtgtttccgagttcccggttgaggtcaatacgcgcctcgtcctcgagaagggactgaccttgatcggctcttctcgctctggttctaaagactttcaagacgtggttgacctctatattcaatacccggatattgtcgacaaattggcgctccttaaaggacaggagttcgaaattgccacaattaatgacctgacagaggcgtttgaggctgacctctccacctcctggggaaagacggttttgaagtggattatgtaacacggatcaacaaaaatgtgcgccagctttgttgtgtgcccttttcctctagcggatcctatccacatttcgtgaatgaaccgattaagctctgacgagatttccttgttttctgtagatacctcttgtagaggtgtcaaagttatgttgtgatcgagagagttacctgcaaggtattatgcaagcggcttgatgaggacactcaactacgtgtgagtaggagtgcgttgctcagcagttgacgcgtgagccgcttgagcagcttgataaaggtcctaatcgtcttccagctgttggcagacgacaatgtgctgtagtagtaggataggcccgtaaaagtgtagaagcaataggttgagactgactgtaatgggtacttgcgttcaaagactgaaagtccaaaggattgctcaaaggcccctgaggtctgagcctctgagcgcgctcttcgtcaaaattcgccggggccatcggtcatcctctcgagggcagcatcttcctgcttgaagactgagtccgtctcagataacttcgtataatgtatgctatacgaagttatcctgcaggagctcagaccttgcatgttagccttgaccttgcctctatgaccactaattcgcacaagattgcacgttaccattgtcatcttgccatgtatccaatgtttcctgtttgccatagtacgtagtagatacatcgatcatcgatgcagatgacgcagatggcattggttcgctttgccctatgcatgcatcatgcatcatgcatcatgcgtcatgcgtcactatccatattaatcattgccctctgtactaggccatgacacctgcagacccttccccagggatgcttcttgtaatagccaatatactacacaactttaccgattacgatcgagatcgatctcactatagtttgtcgaacttcgatgcacatcgagggtgcggaaaaaagctgacggaagcggaagtgggtgaattggttaatttagttagattggcagggttgttcccaagattcaacgcaagctgagaaagaaaacagaaacacgaggcataaggccagtcagaaaatgcattacgaggggagttgaagtgactgtgggccagtgcctgggtcgtcatgtgcaaattttttcttcggttagactgccgcagcatgcagcaactctgccggccctatataactagtgcttcatcttcttgtcattcttgtctctttaccaacacaccggtactctttcaccatgggtaaggaaaagacacacgtatcgcgaccccgactcaactccaacatggacgcagacctgtacggatacaaatgggctcgagataatgtcggacagtcgggtgcgacgatctacagactctatggaaaaccggacgcccccgagctctttcttaaacacggcaagggtagcgttgcaaacgacgtaaccgacgaaatggtccgtctgaattggctaactgagttcatgccactccccaccatcaagcacttcatccgtacacctgacgatgcgtggctgttgactacggccatccccggtaagaccgcttttcaggtcctcgaggaataccctgactcgggcgagaacatcgtggatgccttggctgtgtttttgcgccgccttcactctattccggtctgcaactgccctttcaacagcgaccgtgtttttaggcttgcccaggcacaatcacgcatgaacaatggtctagtcgacgctagtgatttcgatgacgagcgcaacggctggccggtggaacaagtgtggaaagagatgcataagctcctgcccttttccccagactctgtcgtgacgcatggtgatttctcgcttgacaacctcatctttgacgagggcaagctcattggctgcattgacgtcggccgggttggcatcgccgatcgctaccaagatcttgcgatcctctggaattgtctgggcgagttctcccctagcctccagaagcgtctgttccagaaatatgggatcg

SEQ ID NO: 79 - DNA, 4552 bp, synthetic construct
  source 1..4552: mol_type = other DNA
tgcagagccttgcaaatgatgaaagaccaatggaattgatcattgattattgatgatgcatgatgaaagagatagaaacagatgcaagatgggatggcgcgatgatcaaatgataatgaacgttcaacccttcaaaattgaaactctcaggctgagcggctgagcaagctctgagaatgtgggtcttcgaagactttcgcttgagcatggtgcatgtgcaaagagatggaatgtggaattgttgtaggtaggaacacagcccggtagagcggcgcagtggctcagcgaagctgggagaacgactgaaccggtcttgagattcatcatctcagcgtgcgtcagcgcgtcagcttcagcgtttgagaatggcacggactgacctgtcgtacatcccaaggaggcccgtgcgctatactcgccttgtggcctaatctgcgatcaacccatcctcaacgaaagcgcaagtagcgactaagcacactatctttcgggtcggtgcggtcacagtatcggcatctctgtctttagctacgatggtgtgcgtgtaactgatcagtacacccgctgtatcaaaactctatcttcaatccgctaagaatcgtcaccatcagtacatcagtacatcagtgggctaagatctaatggtgtcgttcgacggccgcgggcactagccacgagccaagagcggtacagttgctgcgaaatggtgggcagcctgacaggttcagtttgaataggatgaaaacgccatgaagaacagagaagctggcaattgacgatagtggggcgagcgcacgctgcttgctggtccgagcgtaggacgaacgacaaaccatgggcggggccaccaggccccagggagggcgtcactggttggatgtcgtctgttaggctagagctcaggcgctcagggcctctggcccaagcctcggacgcaagcctctgacgagcgagcgcgcgctggggcgggtctgcgcaggaacggcaggactgccgagttggttgaatattgaatggttggatgattggtttgctgggtttggttttgacacgcacggcacaggacaagtgagtttggaggttggatttgcgcaggtagaaagggcgctcggcctcagggcctcagcgtcagcagacgagctcgccagtccaggtcagtacccagtgttcgttacttcccaccgtccagagtttgctgctgcctctcagcttgattcgtgtcggagaagtagaaatggtcacagcgtaccacacactgtccccatgcctgcgtcctgctccacgagtgtttagccacaaaaatttatggacaaccttactgagcctgtgctggggggtgctttagcaccagcactggcgccatggcgtcaaggttaattccactgtcattcgacaaccttcaactgatgggggcaactgggcacaaaaccttggatatataaccaactccaactcccacggttttttaccttttgctcttctccccaggactcactacttctactcctctattcatcttcaccaaaatgattaataccgtctaccaactggtggcacctcgacgattcgagattaagtattccgacattgatctcaacaataataaggttatcgtccgtcccacctacctctctatctgcaacgcagaccaacgatactaccaaggactccgcgatgccgaaattctgcgtaagaaacttccgatggcgttgatccatgaagccattggagaggtcgtgcgagatccatctggaaactttaaaaccggcgagttggtcgttatggtgccgaacacacctgttgaagaagatgacatcatcgctgagaattatttgcgatcctcgaaatttcgtgcatcgggttttgacggcttcatgcaagaatatgtggaaatcacaccggatcgcctcgttcgtcttccccagaatatcgaccgtactgttgcagcttttacggaaattgtttctgtcagcgtgcatgcaatcggtcgttttgacaagatcgcgcacaaacgacgaaacgttgtcggcatctggggagacggcaacctgggatatattactgcggttttttttaagactatgtttccagagacgaagctgtatatttttggagtcaacccagataaacttcaagattttacgtttgccgacgcgacgtttacggtggagcacattcctgaagacgttaagattgaccatgcttttgagtgcgtgggtggcgcaggctcgggcaaagccattaatcagattatcgactatatcaatcccgaaggtaccatttccattttgggcgtttctgaatacccagtgccaattaacacccgcatggtcctcgagaaaggactgcgcatctttggatcgagccgtagcggtgtcgccgattttgagaagaccgtcgcgctctacaaatccaatcctgagattatcaattatctttcgaatatcgtcggtgcagtcgtcccagtgcgaacgatcgaagatatgaaaaaggcgttcgaaatggacatccaaaaggcttttggtaagacgattatgatgtgggataaataacacggatcaacaaaaatgtgcgccagctttgttgtgtgcccttttcctctagcggatcctatccacatttcgtgaatgaaccgattaagctctgacgagatttccttgttttctgtagatacctcttgtagaggtgtcaaagttatgttgtgatcgagagagttacctgcaaggtattatgcaagcggcttgatgaggacactcaactacgtgtgagtaggagtgcgttgctcagcagttgacgcgtgagccgcttgagcagcttgataaaggtcctaatcgtcttccagctgttggcagacgacaatgtgctgtagtagtaggataggcccgtaaaagtgtagaagcaataggttgagactgactgtaatgggtacttgcgttcaaagactgaaagtccaaaggattgctcaaaggcccctgaggtctgagcctctgagcgcgctcttcgtcaaaattcgccggggccatcggtcatcctctcgagggcagcatcttcctgcttgaagactgagtccgtctcagataacttcgtataatgtatgctatacgaagttatcctgcaggagctcagaccttgcatgttagccttgaccttgcctctatgaccactaattcgcacaagattgcacgttaccattgtcatcttgccatgtatccaatgtttcctgtttgccatagtacgtagtagatacatcgatcatcgatgcagatgacgcagatggcattggttcgctttgccctatgcatgcatcatgcatcatgcatcatgcgtcatgcgtcactatccatattaatcattgccctctgtactaggccatgacacctgcagacccttccccagggatgcttcttgtaatagccaatatactacacaactttaccgattacgatcgagatcgatctcactatagtttgtcgaacttcgatgcacatcgagggtgcggaaaaaagctgacggaagcggaagtgggtgaattggttaatttagttagattggcagggttgttcccaagattcaacgcaagctgagaaagaaaacagaaacacgaggcataaggccagtcagaaaatgcattacgaggggagttgaagtgactgtgggccagtgcctgggtcgtcatgtgcaaattttttcttcggttagactgccgcagcatgcagcaactctgccggccctatataactagtgcttcatcttcttgtcattcttgtctctttaccaacacaccggtactctttcaccatgggtaaggaaaagacacacgtatcgcgaccccgactcaactccaacatggacgcagacctgtacggatacaaatgggctcgagataatgtcggacagtcgggtgcgacgatctacagactctatggaaaaccggacgcccccgagctctttcttaaacacggcaagggtagcgttgcaaacgacgtaaccgacgaaatggtccgtctgaattggctaactgagttcatgccactccccaccatcaagcacttcatccgtacacctgacgatgcgtggctgttgactacggccatccccggtaagaccgcttttcaggtcctcgaggaataccctgactcgggcgagaacatcgtggatgccttggctgtgtttttgcgccgccttcactctattccggtctgcaactgccctttcaacagcgaccgtgtttttaggcttgcccaggcacaatcacgcatgaacaatggtctagtcgacgctagtgatttcgatgacgagcgcaacggctggccggtggaacaagtgtggaaagagatgcataagctcctgcccttttccccagactctgtcgtgacgcatggtgatttctcgcttgacaacctcatctttgacgagggcaagctcattggctgcattgacgtcggccgggttggcatcgccgatcgctaccaagatcttgcgatcctctggaattgtctgggcgagttctcccctagcctccagaagcgtctgttccagaaatatgggatcg

SEQ ID NO: 80 - DNA, 4558 bp, synthetic construct
  source 1..4558: mol_type = other DNA
tgcagagccttgcaaatgatgaaagaccaatggaattgatcattgattattgatgatgcatgatgaaagagatagaaacagatgcaagatgggatggcgcgatgatcaaatgataatgaacgttcaacccttcaaaattgaaactctcaggctgagcggctgagcaagctctgagaatgtgggtcttcgaagactttcgcttgagcatggtgcatgtgcaaagagatggaatgtggaattgttgtaggtaggaacacagcccggtagagcggcgcagtggctcagcgaagctgggagaacgactgaaccggtcttgagattcatcatctcagcgtgcgtcagcgcgtcagcttcagcgtttgagaatggcacggactgacctgtcgtacatcccaaggaggcccgtgcgctatactcgccttgtggcctaatctgcgatcaacccatcctcaacgaaagcgcaagtagcgactaagcacactatctttcgggtcggtgcggtcacagtatcggcatctctgtctttagctacgatggtgtgcgtgtaactgatcagtacacccgctgtatcaaaactctatcttcaatccgctaagaatcgtcaccatcagtacatcagtacatcagtgggctaagatctaatggtgtcgttcgacggccgcgggcactagccacgagccaagagcggtacagttgctgcgaaatggtgggcagcctgacaggttcagtttgaataggatgaaaacgccatgaagaacagagaagctggcaattgacgatagtggggcgagcgcacgctgcttgctggtccgagcgtaggacgaacgacaaaccatgggcggggccaccaggccccagggagggcgtcactggttggatgtcgtctgttaggctagagctcaggcgctcagggcctctggcccaagcctcggacgcaagcctctgacgagcgagcgcgcgctggggcgggtctgcgcaggaacggcaggactgccgagttggttgaatattgaatggttggatgattggtttgctgggtttggttttgacacgcacggcacaggacaagtgagtttggaggttggatttgcgcaggtagaaagggcgctcggcctcagggcctcagcgtcagcagacgagctcgccagtccaggtcagtacccagtgttcgttacttcccaccgtccagagtttgctgctgcctctcagcttgattcgtgtcggagaagtagaaatggtcacagcgtaccacacactgtccccatgcctgcgtcctgctccacgagtgtttagccacaaaaatttatggacaaccttactgagcctgtgctggggggtgctttagcaccagcactggcgccatggcgtcaaggttaattccactgtcattcgacaaccttcaactgatgggggcaactgggcacaaaaccttggatatataaccaactccaactcccacggttttttaccttttgctcttctccccaggactcactacttctactcctctattcatcttcaccaaaatgattaatcaagtctatcgtctcgtctctccacgccaattcgaggtcgcgtataacgatcgcagcctccagtatcacgaggactttgttgtggttcgacctacgcatctgagcatctgcgctgcggatcaacgatattacactggctcgcgtggaaaagaagctatggcaaaaaagcttcccatggctctgatccacgaggccattggtaaagtggtctacgaccccaagggtgagatcaaaaatggcactatggtggtcatgattccgaacacgcctactgaaaaggatgaagtcattggtgagaattatctccgatctagcaaattccgctcgtccggatatgatggattcatgcaagattacgtcttcatgggtcgcgaccgtattgtggaactcccggaaggaattgacccgtatgttgttgcttttaccgagttgatgaccatcacaacccatgtgttgagccgatttgaatctcgttcccataaacgacgtaacgtttttggcgtttggggagacggcaaccttggtttcatcacgacactcttcctgaagaagatgtataaagattgtaaagttatcatcttcggaaaaactggatataaactcgacaatttctctttcgttgatgaggtgtatacgattgacgaaatccctgaggacctgcgcatcgaccatgcctttgagtgcgttggaggtaagggttctcagtatgcaatcgaccaaatgattgaccatctccaccctgaaggttccattgctcttatgggtgttagcgaatttccagttgaagttaatactcgtatgatcctggaaaaaggaatcacactgatcggaagctctcgatccggtcgagaggacttcgtgcgcacggtcaactttctgaaggaaaatcccgatgttgttgaatacctgggtacccttgtgggcgaggtccaagaagtcaagacgatctccgatattttgtctgcatttgagaaagaccttacatcctcttggggtaaaaccgtcatggagtggaagatctaacacggatcaacaaaaatgtgcgccagctttgttgtgtgcccttttcctctagcggatcctatccacatttcgtgaatgaaccgattaagctctgacgagatttccttgttttctgtagatacctcttgtagaggtgtcaaagttatgttgtgatcgagagagttacctgcaaggtattatgcaagcggcttgatgaggacactcaactacgtgtgagtaggagtgcgttgctcagcagttgacgcgtgagccgcttgagcagcttgataaaggtcctaatcgtcttccagctgttggcagacgacaatgtgctgtagtagtaggataggcccgtaaaagtgtagaagcaataggttgagactgactgtaatgggtacttgcgttcaaagactgaaagtccaaaggattgctcaaaggcccctgaggtctgagcctctgagcgcgctcttcgtcaaaattcgccggggccatcggtcatcctctcgagggcagcatcttcctgcttgaagactgagtccgtctcagataacttcgtataatgtatgctatacgaagttatcctgcaggagctcagaccttgcatgttagccttgaccttgcctctatgaccactaattcgcacaagattgcacgttaccattgtcatcttgccatgtatccaatgtttcctgtttgccatagtacgtagtagatacatcgatcatcgatgcagatgacgcagatggcattggttcgctttgccctatgcatgcatcatgcatcatgcatcatgcgtcatgcgtcactatccatattaatcattgccctctgtactaggccatgacacctgcagacccttccccagggatgcttcttgtaatagccaatatactacacaactttaccgattacgatcgagatcgatctcactatagtttgtcgaacttcgatgcacatcgagggtgcggaaaaaagctgacggaagcggaagtgggtgaattggttaatttagttagattggcagggttgttcccaagattcaacgcaagctgagaaagaaaacagaaacacgaggcataaggccagtcagaaaatgcattacgaggggagttgaagtgactgtgggccagtgcctgggtcgtcatgtgcaaattttttcttcggttagactgccgcagcatgcagcaactctgccggccctatataactagtgcttcatcttcttgtcattcttgtctctttaccaacacaccggtactctttcaccatgggtaaggaaaagacacacgtatcgcgaccccgactcaactccaacatggacgcagacctgtacggatacaaatgggctcgagataatgtcggacagtcgggtgcgacgatctacagactctatggaaaaccggacgcccccgagctctttcttaaacacggcaagggtagcgttgcaaacgacgtaaccgacgaaatggtccgtctgaattggctaactgagttcatgccactccccaccatcaagcacttcatccgtacacctgacgatgcgtggctgttgactacggccatccccggtaagaccgcttttcaggtcctcgaggaataccctgactcgggcgagaacatcgtggatgccttggctgtgtttttgcgccgccttcactctattccggtctgcaactgccctttcaacagcgaccgtgtttttaggcttgcccaggcacaatcacgcatgaacaatggtctagtcgacgctagtgatttcgatgacgagcgcaacggctggccggtggaacaagtgtggaaagagatgcataagctcctgcccttttccccagactctgtcgtgacgcatggtgatttctcgcttgacaacctcatctttgacgagggcaagctcattggctgcattgacgtcggccgggttggcatcgccgatcgctaccaagatcttgcgatcctctggaattgtctgggcgagttctcccctagcctccagaagcgtctgttccagaaatatgggatcg

SEQ ID NO: 81 - DNA, 4552 bp, synthetic construct
  source 1..4552: mol_type = other DNA
tgcagagccttgcaaatgatgaaagaccaatggaattgatcattgattattgatgatgcatgatgaaagagatagaaacagatgcaagatgggatggcgcgatgatcaaatgataatgaacgttcaacccttcaaaattgaaactctcaggctgagcggctgagcaagctctgagaatgtgggtcttcgaagactttcgcttgagcatggtgcatgtgcaaagagatggaatgtggaattgttgtaggtaggaacacagcccggtagagcggcgcagtggctcagcgaagctgggagaacgactgaaccggtcttgagattcatcatctcagcgtgcgtcagcgcgtcagcttcagcgtttgagaatggcacggactgacctgtcgtacatcccaaggaggcccgtgcgctatactcgccttgtggcctaatctgcgatcaacccatcctcaacgaaagcgcaagtagcgactaagcacactatctttcgggtcggtgcggtcacagtatcggcatctctgtctttagctacgatggtgtgcgtgtaactgatcagtacacccgctgtatcaaaactctatcttcaatccgctaagaatcgtcaccatcagtacatcagtacatcagtgggctaagatctaatggtgtcgttcgacggccgcgggcactagccacgagccaagagcggtacagttgctgcgaaatggtgggcagcctgacaggttcagtttgaataggatgaaaacgccatgaagaacagagaagctggcaattgacgatagtggggcgagcgcacgctgcttgctggtccgagcgtaggacgaacgacaaaccatgggcggggccaccaggccccagggagggcgtcactggttggatgtcgtctgttaggctagagctcaggcgctcagggcctctggcccaagcctcggacgcaagcctctgacgagcgagcgcgcgctggggcgggtctgcgcaggaacggcaggactgccgagttggttgaatattgaatggttggatgattggtttgctgggtttggttttgacacgcacggcacaggacaagtgagtttggaggttggatttgcgcaggtagaaagggcgctcggcctcagggcctcagcgtcagcagacgagctcgccagtccaggtcagtacccagtgttcgttacttcccaccgtccagagtttgctgctgcctctcagcttgattcgtgtcggagaagtagaaatggtcacagcgtaccacacactgtccccatgcctgcgtcctgctccacgagtgtttagccacaaaaatttatggacaaccttactgagcctgtgctggggggtgctttagcaccagcactggcgccatggcgtcaaggttaattccactgtcattcgacaaccttcaactgatgggggcaactgggcacaaaaccttggatatataaccaactccaactcccacggttttttaccttttgctcttctccccaggactcactacttctactcctctattcatcttcaccaaaatgctcaaccaagtgtatcgcctggtcgatccacgtcagattgaagttcaaactgttgcagaagagatcactgataatgacatcgtcgtccgccccaaatatctgtcggtctgtcatgcagacacgcgatactttacaggtcaacgtccccaagcaaccttgcgccagaagctcccaatggctttgatccatgaaggagttggcgaggttgttaaggaccctcaaaataaatttaagcccggtacgttggtcgctatggtccccaatacgccctttgaaaccgaccctatcattaaagaaaactacttgccaacgtctaaatttcgcagcagcggttacgatggtttcatgcaggaatacgttacacttcatcgtgatcgcgcgatcgtcgtgccagacaacttcgaccaccaaatgagcgcattcattgagatggtttccgtcggagtccacgccctcacccagctggaggccgtgatggatgcggatcgcaagatcatcggaatttggggagatggcaacttgggttttatcacagcaaccctcgtcaagcaaatctttccagactctcaactgatgatctttggacgacatcgctccaaattggactatttcagctttgcggacaagacatacctggtggacgacattcctagcgatcttcaagtttctcaggctctggaatgcaccggaggccgaggctcggagtctgctattgctcaaattatccaacacattcgaccaatgggcaccgctatccttatgggagtttccgaagatcccgttggtatcgatacacgcagcgtgttggcagagggattgacccttcgcggcgtgagccgtagcggtcgcgcggattttcagcgcgccatcgacattttgacgaaatcccccgtcacacgtgaacgtctgcaaaatcttgtgggtttcactcgaaaggtcagcacaatccaggatatcaccgatttcttcgagggtgcattgacaaactactggggcaaggccgttatggagtgggatgtttaacacggatcaacaaaaatgtgcgccagctttgttgtgtgcccttttcctctagcggatcctatccacatttcgtgaatgaaccgattaagctctgacgagatttccttgttttctgtagatacctcttgtagaggtgtcaaagttatgttgtgatcgagagagttacctgcaaggtattatgcaagcggcttgatgaggacactcaactacgtgtgagtaggagtgcgttgctcagcagttgacgcgtgagccgcttgagcagcttgataaaggtcctaatcgtcttccagctgttggcagacgacaatgtgctgtagtagtaggataggcccgtaaaagtgtagaagcaataggttgagactgactgtaatgggtacttgcgttcaaagactgaaagtccaaaggattgctcaaaggcccctgaggtctgagcctctgagcgcgctcttcgtcaaaattcgccggggccatcggtcatcctctcgagggcagcatcttcctgcttgaagactgagtccgtctcagataacttcgtataatgtatgctatacgaagttatcctgcaggagctcagaccttgcatgttagccttgaccttgcctctatgaccactaattcgcacaagattgcacgttaccattgtcatcttgccatgtatccaatgtttcctgtttgccatagtacgtagtagatacatcgatcatcgatgcagatgacgcagatggcattggttcgctttgccctatgcatgcatcatgcatcatgcatcatgcgtcatgcgtcactatccatattaatcattgccctctgtactaggccatgacacctgcagacccttccccagggatgcttcttgtaatagccaatatactacacaactttaccgattacgatcgagatcgatctcactatagtttgtcgaacttcgatgcacatcgagggtgcggaaaaaagctgacggaagcggaagtgggtgaattggttaatttagttagattggcagggttgttcccaagattcaacgcaagctgagaaagaaaacagaaacacgaggcataaggccagtcagaaaatgcattacgaggggagttgaagtgactgtgggccagtgcctgggtcgtcatgtgcaaattttttcttcggttagactgccgcagcatgcagcaactctgccggccctatataactagtgcttcatcttcttgtcattcttgtctctttaccaacacaccggtactctttcaccatgggtaaggaaaagacacacgtatcgcgaccccgactcaactccaacatggacgcagacctgtacggatacaaatgggctcgagataatgtcggacagtcgggtgcgacgatctacagactctatggaaaaccggacgcccccgagctctttcttaaacacggcaagggtagcgttgcaaacgacgtaaccgacgaaatggtccgtctgaattggctaactgagttcatgccactccccaccatcaagcacttcatccgtacacctgacgatgcgtggctgttgactacggccatccccggtaagaccgcttttcaggtcctcgaggaataccctgactcgggcgagaacatcgtggatgccttggctgtgtttttgcgccgccttcactctattccggtctgcaactgccctttcaacagcgaccgtgtttttaggcttgcccaggcacaatcacgcatgaacaatggtctagtcgacgctagtgatttcgatgacgagcgcaacggctggccggtggaacaagtgtggaaagagatgcataagctcctgcccttttccccagactctgtcgtgacgcatggtgatttctcgcttgacaacctcatctttgacgagggcaagctcattggctgcattgacgtcggccgggttggcatcgccgatcgctaccaagatcttgcgatcctctggaattgtctgggcgagttctcccctagcctccagaagcgtctgttccagaaatatgggatcg

SEQ ID NO: 82 - DNA, 4594 bp, synthetic construct
  source 1..4594: mol_type = other DNA
tgcagagccttgcaaatgatgaaagaccaatggaattgatcattgattattgatgatgcatgatgaaagagatagaaacagatgcaagatgggatggcgcgatgatcaaatgataatgaacgttcaacccttcaaaattgaaactctcaggctgagcggctgagcaagctctgagaatgtgggtcttcgaagactttcgcttgagcatggtgcatgtgcaaagagatggaatgtggaattgttgtaggtaggaacacagcccggtagagcggcgcagtggctcagcgaagctgggagaacgactgaaccggtcttgagattcatcatctcagcgtgcgtcagcgcgtcagcttcagcgtttgagaatggcacggactgacctgtcgtacatcccaaggaggcccgtgcgctatactcgccttgtggcctaatctgcgatcaacccatcctcaacgaaagcgcaagtagcgactaagcacactatctttcgggtcggtgcggtcacagtatcggcatctctgtctttagctacgatggtgtgcgtgtaactgatcagtacacccgctgtatcaaaactctatcttcaatccgctaagaatcgtcaccatcagtacatcagtacatcagtgggctaagatctaatggtgtcgttcgacggccgcgggcactagccacgagccaagagcggtacagttgctgcgaaatggtgggcagcctgacaggttcagtttgaataggatgaaaacgccatgaagaacagagaagctggcaattgacgatagtggggcgagcgcacgctgcttgctggtccgagcgtaggacgaacgacaaaccatgggcggggccaccaggccccagggagggcgtcactggttggatgtcgtctgttaggctagagctcaggcgctcagggcctctggcccaagcctcggacgcaagcctctgacgagcgagcgcgcgctggggcgggtctgcgcaggaacggcaggactgccgagttggttgaatattgaatggttggatgattggtttgctgggtttggttttgacacgcacggcacaggacaagtgagtttggaggttggatttgcgcaggtagaaagggcgctcggcctcagggcctcagcgtcagcagacgagctcgccagtccaggtcagtacccagtgttcgttacttcccaccgtccagagtttgctgctgcctctcagcttgattcgtgtcggagaagtagaaatggtcacagcgtaccacacactgtccccatgcctgcgtcctgctccacgagtgtttagccacaaaaatttatggacaaccttactgagcctgtgctggggggtgctttagcaccagcactggcgccatggcgtcaaggttaattccactgtcattcgacaaccttcaactgatgggggcaactgggcacaaaaccttggatatataaccaactccaactcccacggttttttaccttttgctcttctccccaggactcactacttctactcctctattcatcttcaccaaaatgtgagacctaatatcactgctgtacagacaagactgtgtatattaggtctcaatgatcaattacgtgtatcagctggtcagcccccacgtcttttccctcaaatatgaagaagtggacttcaagaaagaggtcatcatccgtccgaagtgtatggctgtgtgccacgcagaccagcgatattttctgggacgccgcgacgctaagatcctgcgacaaaaattgcctatggcccttatccacgaatgttgcggtcaggtggtctgggatggcacaggttccttccaacgaggccaaaaggtcgttctcattccaaatgtgccaggacgcgacgacggtgtcacatacgaaaactacgctgaaggatctcgttttcttagctcgggctgcgacggtttcatgcgcgagtatgtcaacctttccccagatcgtgtggttcccttcgaacaggttccgcttccggtggccgcgatcacagagttcgtgtccgtggcggttcacgcggccggtcgctttatgcgagcggcgcacacacgccgcgaggctatcggagtgtggggagatggctctctggcttatgtcgtctgctgcgttcttcgtcgactgctcccggagtcgcgtatttttgtggtgggtaagcatgaacgcaagttgctccagttctcgtttgccgatcgcaccttcctttttgatagcctcccggaggacttccatattgaccacgcgttcgaatgcactggaggagagggctcttactatgctatcgatgatattattaccgcggtgcgtccccaaggcgctgttatgcttatgggtgtctctgaaaaccgcgttccagttcgcacccgtgacattctggaaaaaggcttgacgttcaccggttgttctcgttctggacgcgaagactttgttaaggcagtcgagcttatggagcaaccccaattccaaaaacgccttagcgcaattatttacgaggatcgtccggtccatactgtcgccgatctgtcccgtgttttcgagacggatttgaatacgccgttcaagacagttttccgttgggagatttaacacggatcaacaaaaatgtgcgccagctttgttgtgtgcccttttcctctagcggatcctatccacatttcgtgaatgaaccgattaagctctgacgagatttccttgttttctgtagatacctcttgtagaggtgtcaaagttatgttgtgatcgagagagttacctgcaaggtattatgcaagcggcttgatgaggacactcaactacgtgtgagtaggagtgcgttgctcagcagttgacgcgtgagccgcttgagcagcttgataaaggtcctaatcgtcttccagctgttggcagacgacaatgtgctgtagtagtaggataggcccgtaaaagtgtagaagcaataggttgagactgactgtaatgggtacttgcgttcaaagactgaaagtccaaaggattgctcaaaggcccctgaggtctgagcctctgagcgcgctcttcgtcaaaattcgccggggccatcggtcatcctctcgagggcagcatcttcctgcttgaagactgagtccgtctcagataacttcgtataatgtatgctatacgaagttatcctgcaggagctcagaccttgcatgttagccttgaccttgcctctatgaccactaattcgcacaagattgcacgttaccattgtcatcttgccatgtatccaatgtttcctgtttgccatagtacgtagtagatacatcgatcatcgatgcagatgacgcagatggcattggttcgctttgccctatgcatgcatcatgcatcatgcatcatgcgtcatgcgtcactatccatattaatcattgccctctgtactaggccatgacacctgcagacccttccccagggatgcttcttgtaatagccaatatactacacaactttaccgattacgatcgagatcgatctcactatagtttgtcgaacttcgatgcacatcgagggtgcggaaaaaagctgacggaagcggaagtgggtgaattggttaatttagttagattggcagggttgttcccaagattcaacgcaagctgagaaagaaaacagaaacacgaggcataaggccagtcagaaaatgcattacgaggggagttgaagtgactgtgggccagtgcctgggtcgtcatgtgcaaattttttcttcggttagactgccgcagcatgcagcaactctgccggccctatataactagtgcttcatcttcttgtcattcttgtctctttaccaacacaccggtactctttcaccatgggtaaggaaaagacacacgtatcgcgaccccgactcaactccaacatggacgcagacctgtacggatacaaatgggctcgagataatgtcggacagtcgggtgcgacgatctacagactctatggaaaaccggacgcccccgagctctttcttaaacacggcaagggtagcgttgcaaacgacgtaaccgacgaaatggtccgtctgaattggctaactgagttcatgccactccccaccatcaagcacttcatccgtacacctgacgatgcgtggctgttgactacggccatccccggtaagaccgcttttcaggtcctcgaggaataccctgactcgggcgagaacatcgtggatgccttggctgtgtttttgcgccgccttcactctattccggtctgcaactgccctttcaacagcgaccgtgtttttaggcttgcccaggcacaatcacgcatgaacaatggtctagtcgacgctagtgatttcgatgacgagcgcaacggctggccggtggaacaagtgtggaaagagatgcataagctcctgcccttttccccagactctgtcgtgacgcatggtgatttctcgcttgacaacctcatctttgacgagggcaagctcattggctgcattgacgtcggccgggttggcatcgccgatcgctaccaagatcttgcgatcctctggaattgtctgggcgagttctcccctagcctccagaagcgtctgttccagaaatatgggatcg

SEQ ID NO: 83 - DNA, 4606 bp, synthetic construct
  source 1..4606: mol_type = other DNA
tgcagagccttgcaaatgatgaaagaccaatggaattgatcattgattattgatgatgcatgatgaaagagatagaaacagatgcaagatgggatggcgcgatgatcaaatgataatgaacgttcaacccttcaaaattgaaactctcaggctgagcggctgagcaagctctgagaatgtgggtcttcgaagactttcgcttgagcatggtgcatgtgcaaagagatggaatgtggaattgttgtaggtaggaacacagcccggtagagcggcgcagtggctcagcgaagctgggagaacgactgaaccggtcttgagattcatcatctcagcgtgcgtcagcgcgtcagcttcagcgtttgagaatggcacggactgacctgtcgtacatcccaaggaggcccgtgcgctatactcgccttgtggcctaatctgcgatcaacccatcctcaacgaaagcgcaagtagcgactaagcacactatctttcgggtcggtgcggtcacagtatcggcatctctgtctttagctacgatggtgtgcgtgtaactgatcagtacacccgctgtatcaaaactctatcttcaatccgctaagaatcgtcaccatcagtacatcagtacatcagtgggctaagatctaatggtgtcgttcgacggccgcgggcactagccacgagccaagagcggtacagttgctgcgaaatggtgggcagcctgacaggttcagtttgaataggatgaaaacgccatgaagaacagagaagctggcaattgacgatagtggggcgagcgcacgctgcttgctggtccgagcgtaggacgaacgacaaaccatgggcggggccaccaggccccagggagggcgtcactggttggatgtcgtctgttaggctagagctcaggcgctcagggcctctggcccaagcctcggacgcaagcctctgacgagcgagcgcgcgctggggcgggtctgcgcaggaacggcaggactgccgagttggttgaatattgaatggttggatgattggtttgctgggtttggttttgacacgcacggcacaggacaagtgagtttggaggttggatttgcgcaggtagaaagggcgctcggcctcagggcctcagcgtcagcagacgagctcgccagtccaggtcagtacccagtgttcgttacttcccaccgtccagagtttgctgctgcctctcagcttgattcgtgtcggagaagtagaaatggtcacagcgtaccacacactgtccccatgcctgcgtcctgctccacgagtgtttagccacaaaaatttatggacaaccttactgagcctgtgctggggggtgctttagcaccagcactggcgccatggcgtcaaggttaattccactgtcattcgacaaccttcaactgatgggggcaactgggcacaaaaccttggatatataaccaactccaactcccacggttttttaccttttgctcttctccccaggactcactacttctactcctctattcatcttcaccaaaatgtgagacctaatatcactgctgtacagacaagactgtgtatattaggtctcaatgcttaaccaagtttatcgactcgtttctccccgtcagttcgaggtggagacagtcgcagaagaagttgatgcggatgacttgatcgtgcgtcccaagtttctcagcatttgccacgcggacactcgatacttttttggacagcgctcgcaagccgcactccgagccaaacttccgatggctttgattcacgaggccgtcggtgaagtcgtttacgatccccgtaatgaatacaagcccggaaccttggtcgcaatggtgcctaacaccccggtcaagaaggatagcatcattcaagaaaattacctgcccagctcccgtttccgatctagcggttatgatggcttcatgcaagaatacgtgtgtctgcgacgtgatcgagctattactgttccttccgactttgacccgcatatggcggcgttcattgagatggtttccgttggagtgcaggcacttactaagttggaatccacaatggatgaggatcaacgcgttattggcatttggggtgacggaaatctcggttacatcaccgccaccctcgttaagcaaatctttccagactctcagctcctcgtcttcggacgccatcagtctaaactggattatttctcgtttgcagataagacgtatctggtggacgatatcccggccgacgtcaaagtttcgcaggccctcgaatgtacgggcggtcagggctccgaagccgcgatccaacagatcatccaacacattcaaccgatgggtacggcaattctcatgggtgtttctgagaatcccgtcggaatcgacactcgttcggttcttgctgaaggtctgactctccgaggagtgtcccgtagctcgcgcgaggattttaagcgtgcggttgacatcctgtcctcttcgccagttacgcgtgaacgattgcagaatctcgtcggctatgttcagaaggttagctccatccaagacattaccaacttctttgatagcgccctcactaattactggggcaaggaggtgatggagtgggacgtgtaacacggatcaacaaaaatgtgcgccagctttgttgtgtgcccttttcctctagcggatcctatccacatttcgtgaatgaaccgattaagctctgacgagatttccttgttttctgtagatacctcttgtagaggtgtcaaagttatgttgtgatcgagagagttacctgcaaggtattatgcaagcggcttgatgaggacactcaactacgtgtgagtaggagtgcgttgctcagcagttgacgcgtgagccgcttgagcagcttgataaaggtcctaatcgtcttccagctgttggcagacgacaatgtgctgtagtagtaggataggcccgtaaaagtgtagaagcaataggttgagactgactgtaatgggtacttgcgttcaaagactgaaagtccaaaggattgctcaaaggcccctgaggtctgagcctctgagcgcgctcttcgtcaaaattcgccggggccatcggtcatcctctcgagggcagcatcttcctgcttgaagactgagtccgtctcagataacttcgtataatgtatgctatacgaagttatcctgcaggagctcagaccttgcatgttagccttgaccttgcctctatgaccactaattcgcacaagattgcacgttaccattgtcatcttgccatgtatccaatgtttcctgtttgccatagtacgtagtagatacatcgatcatcgatgcagatgacgcagatggcattggttcgctttgccctatgcatgcatcatgcatcatgcatcatgcgtcatgcgtcactatccatattaatcattgccctctgtactaggccatgacacctgcagacccttccccagggatgcttcttgtaatagccaatatactacacaactttaccgattacgatcgagatcgatctcactatagtttgtcgaacttcgatgcacatcgagggtgcggaaaaaagctgacggaagcggaagtgggtgaattggttaatttagttagattggcagggttgttcccaagattcaacgcaagctgagaaagaaaacagaaacacgaggcataaggccagtcagaaaatgcattacgaggggagttgaagtgactgtgggccagtgcctgggtcgtcatgtgcaaattttttcttcggttagactgccgcagcatgcagcaactctgccggccctatataactagtgcttcatcttcttgtcattcttgtctctttaccaacacaccggtactctttcaccatgggtaaggaaaagacacacgtatcgcgaccccgactcaactccaacatggacgcagacctgtacggatacaaatgggctcgagataatgtcggacagtcgggtgcgacgatctacagactctatggaaaaccggacgcccccgagctctttcttaaacacggcaagggtagcgttgcaaacgacgtaaccgacgaaatggtccgtctgaattggctaactgagttcatgccactccccaccatcaagcacttcatccgtacacctgacgatgcgtggctgttgactacggccatccccggtaagaccgcttttcaggtcctcgaggaataccctgactcgggcgagaacatcgtggatgccttggctgtgtttttgcgccgccttcactctattccggtctgcaactgccctttcaacagcgaccgtgtttttaggcttgcccaggcacaatcacgcatgaacaatggtctagtcgacgctagtgatttcgatgacgagcgcaacggctggccggtggaacaagtgtggaaagagatgcataagctcctgcccttttccccagactctgtcgtgacgcatggtgatttctcgcttgacaacctcatctttgacgagggcaagctcattggctgcattgacgtcggccgggttggcatcgccgatcgctaccaagatcttgcgatcctctggaattgtctgggcgagttctcccctagcctccagaagcgtctgttccagaaatatgggatcg

SEQ ID NO: 84 - DNA, 4555 bp, synthetic construct
  source 1..4555: mol_type = other DNA
tgcagagccttgcaaatgatgaaagaccaatggaattgatcattgattattgatgatgcatgatgaaagagatagaaacagatgcaagatgggatggcgcgatgatcaaatgataatgaacgttcaacccttcaaaattgaaactctcaggctgagcggctgagcaagctctgagaatgtgggtcttcgaagactttcgcttgagcatggtgcatgtgcaaagagatggaatgtggaattgttgtaggtaggaacacagcccggtagagcggcgcagtggctcagcgaagctgggagaacgactgaaccggtcttgagattcatcatctcagcgtgcgtcagcgcgtcagcttcagcgtttgagaatggcacggactgacctgtcgtacatcccaaggaggcccgtgcgctatactcgccttgtggcctaatctgcgatcaacccatcctcaacgaaagcgcaagtagcgactaagcacactatctttcgggtcggtgcggtcacagtatcggcatctctgtctttagctacgatggtgtgcgtgtaactgatcagtacacccgctgtatcaaaactctatcttcaatccgctaagaatcgtcaccatcagtacatcagtacatcagtgggctaagatctaatggtgtcgttcgacggccgcgggcactagccacgagccaagagcggtacagttgctgcgaaatggtgggcagcctgacaggttcagtttgaataggatgaaaacgccatgaagaacagagaagctggcaattgacgatagtggggcgagcgcacgctgcttgctggtccgagcgtaggacgaacgacaaaccatgggcggggccaccaggccccagggagggcgtcactggttggatgtcgtctgttaggctagagctcaggcgctcagggcctctggcccaagcctcggacgcaagcctctgacgagcgagcgcgcgctggggcgggtctgcgcaggaacggcaggactgccgagttggttgaatattgaatggttggatgattggtttgctgggtttggttttgacacgcacggcacaggacaagtgagtttggaggttggatttgcgcaggtagaaagggcgctcggcctcagggcctcagcgtcagcagacgagctcgccagtccaggtcagtacccagtgttcgttacttcccaccgtccagagtttgctgctgcctctcagcttgattcgtgtcggagaagtagaaatggtcacagcgtaccacacactgtccccatgcctgcgtcctgctccacgagtgtttagccacaaaaatttatggacaaccttactgagcctgtgctggggggtgctttagcaccagcactggcgccatggcgtcaaggttaattccactgtcattcgacaaccttcaactgatgggggcaactgggcacaaaaccttggatatataaccaactccaactcccacggttttttaccttttgctcttctccccaggactcactacttctactcctctattcatcttcaccaaaatgattaatacactgtacaaacttacggccccactgattgtggaatccttttatgaaaatatcgactgtcattccgacaatattattgtgcgccccgaaaaactttctatctgcaaggctgacatccgatactacttcggaatgcgtaatgctaaagtgcttaaagagaagttgcccctcgcactcattcatgaggcatgtggctctgttgtctatgacatcaccggcaagtttaaggctggtgaccaggtcgttatgcttcctaatattccgggtattaacatgcagtatcatgagaattatcgtcgtgatagccttttccgcagctctggagcagacggattcatgcaggagttggtgtcgatccctcagtcgcaagtcatcaaatttgagaagatggatcaaaacattgccgcgttcacggagttcatctctgtcgctattcatgcagtcagctcgtatcttgatcgcagcgcgggaaagcgaaatggtatcaagcgtaaaatcggtgtgtggggtagcggcgcaatgggctacgcggtgtcgtgtgtcttgaagtacttcattccatctgcagagatcactgtcattggaggtagcaaagcaaagctggacatgttttcctttgtcaatcatacttgttccctgagcgagcttcctgacgatgcagagttcgatgattgcttcgaatgtgtcggtggagcccaatctggcaatgcaatcaatcaaattatcgatcatattctgccggaaggcctcctgctgttgttgggcgttagcgaagaggccgtgcctgtcaacactcgaatggtgctcgaaaaaggcatcactttgttgggtcgatcgcgctctgagcgttcggactttatcaaaacaatcgacatccttgatacgaacgagaatattcgacgccgcatttctaacttgatctctggcgaggtggagattaacgaggtgaacgacatccacaaggcttttaatcagtccaaaattgcagactataaaatcatcttgaattggcgtatttaacacggatcaacaaaaatgtgcgccagctttgttgtgtgcccttttcctctagcggatcctatccacatttcgtgaatgaaccgattaagctctgacgagatttccttgttttctgtagatacctcttgtagaggtgtcaaagttatgttgtgatcgagagagttacctgcaaggtattatgcaagcggcttgatgaggacactcaactacgtgtgagtaggagtgcgttgctcagcagttgacgcgtgagccgcttgagcagcttgataaaggtcctaatcgtcttccagctgttggcagacgacaatgtgctgtagtagtaggataggcccgtaaaagtgtagaagcaataggttgagactgactgtaatgggtacttgcgttcaaagactgaaagtccaaaggattgctcaaaggcccctgaggtctgagcctctgagcgcgctcttcgtcaaaattcgccggggccatcggtcatcctctcgagggcagcatcttcctgcttgaagactgagtccgtctcagataacttcgtataatgtatgctatacgaagttatcctgcaggagctcagaccttgcatgttagccttgaccttgcctctatgaccactaattcgcacaagattgcacgttaccattgtcatcttgccatgtatccaatgtttcctgtttgccatagtacgtagtagatacatcgatcatcgatgcagatgacgcagatggcattggttcgctttgccctatgcatgcatcatgcatcatgcatcatgcgtcatgcgtcactatccatattaatcattgccctctgtactaggccatgacacctgcagacccttccccagggatgcttcttgtaatagccaatatactacacaactttaccgattacgatcgagatcgatctcactatagtttgtcgaacttcgatgcacatcgagggtgcggaaaaaagctgacggaagcggaagtgggtgaattggttaatttagttagattggcagggttgttcccaagattcaacgcaagctgagaaagaaaacagaaacacgaggcataaggccagtcagaaaatgcattacgaggggagttgaagtgactgtgggccagtgcctgggtcgtcatgtgcaaattttttcttcggttagactgccgcagcatgcagcaactctgccggccctatataactagtgcttcatcttcttgtcattcttgtctctttaccaacacaccggtactctttcaccatgggtaaggaaaagacacacgtatcgcgaccccgactcaactccaacatggacgcagacctgtacggatacaaatgggctcgagataatgtcggacagtcgggtgcgacgatctacagactctatggaaaaccggacgcccccgagctctttcttaaacacggcaagggtagcgttgcaaacgacgtaaccgacgaaatggtccgtctgaattggctaactgagttcatgccactccccaccatcaagcacttcatccgtacacctgacgatgcgtggctgttgactacggccatccccggtaagaccgcttttcaggtcctcgaggaataccctgactcgggcgagaacatcgtggatgccttggctgtgtttttgcgccgccttcactctattccggtctgcaactgccctttcaacagcgaccgtgtttttaggcttgcccaggcacaatcacgcatgaacaatggtctagtcgacgctagtgatttcgatgacgagcgcaacggctggccggtggaacaagtgtggaaagagatgcataagctcctgcccttttccccagactctgtcgtgacgcatggtgatttctcgcttgacaacctcatctttgacgagggcaagctcattggctgcattgacgtcggccgggttggcatcgccgatcgctaccaagatcttgcgatcctctggaattgtctgggcgagttctcccctagcctccagaagcgtctgttccagaaatatgggatcg

SEQ ID NO: 85 - DNA, 500 bp, Moniliella pollinis
  source 1..500: mol_type = genomic DNA
tgcagagccttgcaaatgatgaaagaccaatggaattgatcattgattattgatgatgcatgatgaaagagatagaaacagatgcaagatgggatggcgcgatgatcaaatgataatgaacgttcaacccttcaaaattgaaactctcaggctgagcggctgagcaagctctgagaatgtgggtcttcgaagactttcgcttgagcatggtgcatgtgcaaagagatggaatgtggaattgttgtaggtaggaacacagcccggtagagcggcgcagtggctcagcgaagctgggagaacgactgaaccggtcttgagattcatcatctcagcgtgcgtcagcgcgtcagcttcagcgtttgagaatggcacggactgacctgtcgtacatcccaaggaggcccgtgcgctatactcgccttgtggcctaatctgcgatcaacccatcctcaacgaaagcgcaagtagcgactaagcacactatctttcgggtcggtgcg

SEQ ID NO: 86 - DNA, 1002 bp, Moniliella pollinis
  source 1..1002: mol_type = other DNA
tttagctacgatggtgtgcgtgtaactgatcagtacacccgctgtatcaaaactctatcttcaatccgctaagaatcgtcaccatcagtacatcagtacatcagtgggctaagatctaatggtgtcgttcgacggccgcgggcactagccacgagccaagagcggtacagttgctgcgaaatggtgggcagcctgacaggttcagtttgaataggatgaaaacgccatgaagaacagagaagctggcaattgacgatagtggggcgagcgcacgctgcttgctggtccgagcgtaggacgaacgacaaaccatgggcggggccaccaggccccagggagggcgtcactggttggatgtcgtctgttaggctagagctcaggcgctcagggcctctggcccaagcctcggacgcaagcctctgacgagcgagcgcgcgctggggcgggtctgcgcaggaacggcaggactgccgagttggttgaatattgaatggttggatgattggtttgctgggtttggttttgacacgcacggcacaggacaagtgagtttggaggttggatttgcgcaggtagaaagggcgctcggcctcagggcctcagcgtcagcagacgagctcgccagtccaggtcagtacccagtgttcgttacttcccaccgtccagagtttgctgctgcctctcagcttgattcgtgtcggagaagtagaaatggtcacagcgtaccacacactgtccccatgcctgcgtcctgctccacgagtgtttagccacaaaaatttatggacaaccttactgagcctgtgctggggggtgctttagcaccagcactggcgccatggcgtcaaggttaattccactgtcattcgacaaccttcaactgatgggggcaactgggcacaaaaccttggatatataaccaactccaactcccacggttttttaccttttgctcttctccccaggactcactacttctactcctctattcatcttcaccaa

SEQ ID NO: 87 - DNA, 1038 bp, synthetic construct
  source 1..1038: mol_type = other DNA
atgaaagccctcgttttggacgaatacaatcaattgaattaccgtgatttccccgagcccgaaatccactccggagaggtgctgatcgagatcaaggcgtgcggtatttgtggctctgatgtgcacggtatggacggatcgaccggacgtcgaaaaccaccgctggttatgggtcacgaagcctctggcgtcattatcgaaaccggtagcgatgttaagaactggaaaacaggtgaccgagtcacgtttgatagcaccgtgtacccacttaatgactggttcactctgaaaggccactacaacctcagcaacaatcgacaagtgttgggagtgtctcctggcgagtatcgccgtcatggtgcgtttgccgaacgacttgcggttccgcaacatatcctgcaccgaatcccagagaacgttagcttcgtggaggctgcgatggttgagcccatcgctgtggcagctcacgcggtgaatgtttctggattgaagccgggcaattcggctatggttgcgggcgcgggcatggtcggagtgtttgttgtccaactgctgaagctttttggagctaaccctgttgtggttattgacatcgatcacaagaaactgaagcttgctcacgaattcggtgctgactttacattcaatcctaaagaaaaggatattgacgaacgaatcttgcaactcacaaaatcgcgcggttttgaccttacatttgaagtcgtcggcatcaccgagacggtccagacctgcattaccaacacacgtaagggtggcacggtggttcttgttggaaacttgtcccccgaaatccaatttcccctgcaaaaagtcgttacttctgaaatcactgtgcagggctcttgtgccatcaagggtgaatacgagctggcactggacctcttggccgcaaagaaggttgacgtctcgaaactcgtttcggctgttgcaccgctgtctgagggagcggaatggtttaagcgactttacgagaaggaaccgggattgaataaagtgatcctcattccagataagtaa

SEQ ID NO: 88 - DNA, 978 bp, synthetic construct
  source 1..978: mol_type = other DNA
atgaaagctatggtgtggcttggacccgaacgaatggaagtgcgagatcttcctgcgccgcgaccgggtgcaggtgaagtgctggttcagacggaagctgctggaatttgtggctctgaagtggaggcctatttgggtcgcatggctaatcgaacaccgccgttggtgatgggtcacgaatatgctggacttgtcaccgaggtcggagagggagtcgaccgcgtctggtcccgtcgacgcgttgcggttaacccgattgttggttgcggtcgttgtcgaaactgcgccgccggtgatcgaaacttgtgtcctgatcgtcaccttcttggcattgcagcgccaggaggattcgcagcgttctcggtggttcccgaacgatgcctcttttctctgcctgaaggaatggatgcgcgactgggcgcgctcaccaagccattggccaacggtgtgcatcttattcgcaaaagcggcgcgggacgaggccgagttgtggttatcggcgcgggaactattggactcggatgtttgcaagctgctttgttgcacggtgctgagcaagttgacgtcgttgaacgccatccgggacgacgccgtcacgcacttgccctgggagcacgccaggcggtggcggaattggcagatgtcgaacctggtgctgatcttgtggttgatgccgcaggatccgaagcgacacgccgcgcggccgtggaattggttggcccggcgggaacggcctcttttgttggactccactccgacgaaactgtcctgccttggcatcgcattatccgagccaatattcgagttcaaggaacatttggctacgcagatcgtgatttccagcaagctcttgactggttggcagcgggaaaggcagccattccattgtctgaactccgccccttggacgatggcccagcggccttcgagcgccttgctcgtggaccgatcgacgaaatcaaagtctttttggcttaa

SEQ ID NO: 89 - DNA, 1014 bp, synthetic construct
  source 1..1014: mol_type = other DNA
atgaagtcgttgatttactatggcccgcacgatctgcgatatggagattctcctaagccaaagatccgatctggagaagtcctcctccgaatcaaaagcgtcggtatctgcggcactgacctccacatctataacggaggcatgaaaaatctgccgttgcctctgattatgggtcacgagttcagcggagttattgaagagcttgcccgagacgtgaagaactttaaggttggagatcgagtgatcgctgaacacgttatcaattgtggaaaatgttcgtattgtcttagcggcaagccgaatctgtgtgctaactctcgcattattggagttcaccgccccggagcgctcgccgaatacttggctgttcccgcggacctggtgtacaagatcccggcgaaactgtcttttgaagagggcgcaatgatcgaacccctttctatcgcctattatgccgtgaagcaagctcgtagcatcctgggtaaaaaggtggcggtcatcggccaaggacccatcggcctgctgcttgaccaaatcctccgcgacgcaggcgctgaagtcattggcattgacatcgcagattggcgattgaaactcgcgaagaaaaagaagtgggcagatcatacaatcaactccagccagaaaacctggctcaagaagatccagaagatcgcaccagaaggcgtggacacagtgtttgaggttgttggccgtgaggaaactgccgagatggctattgaaatcgcgcgtcgagatggtgacgtttttatcctcggtgtctttgaaagcgccgcatctttgaacatgatgaatattgttaagaaggaactcaacgtgttcggaagctggacctgtgcgttttctttccccccttcgattgctctcgccgttgccaagaaagttgatttgaaatccttgatcacgaatcgatatgacgtgaaggacggtgccctggcatttaaggagtctgcctcttataaaggtaagcgaatcaagactgttatcaacttttaa

SEQ ID NO: 90 - DNA, 1044 bp, synthetic construct
  source 1..1044: mol_type = other DNA
atgaaggcaatgttgcttagccagtatcgacgactggaaattgccgagttgccgacaccgatccctggtcgtggcgaactcttgatccatgtcgcggcatgtggtatttgcggaagcgatgtgcacggatacgatggcagcagcggacgacgtatccctccaatcgtgatgggccatgaggctgcaggacgtgttgcggcactcggtccgcaggtcacgggctggtcggaaggtgatcgcgtcacattcgatagcaccatctcctgcggcacttgcccttactgctcccgcggcgagattaacctctgcgaccgtcgtcaagtgcttggagtttcgtgcggtgactatcgttgcgctggagcttttgcggagtatgttattgtgccgcaacgcattgcttataaattgccggatgccttgagcttctcggaggccgcaactttggaagcggtcgcggttgctgtgcacgctgttagcctttcccaggtttcgccaggtactcaggcactggttattggcgctggtatgattggcctcctcaccttgcaagcgctgcgcgcagccggttgcagctccgtggtgatcgcggacgttgatgcgtcccgtctgcgtttggctaaagaggttggcgcaaccgaaacgcttaatgcgacaggagatgaatttgttgccgaaatcttcaaacgcacaaacggagcgggcacagaccttgccgtcgaagctgtcggtatcgatgctaccgtccgaacggccattaactctgtccgaaaaggcggtacagttaccctggtcggcaatatcacgccggaggtcactcttccgcttcagaaggtggtgacacgccagattcgaatccaaggttcttgcgcatccgctggtgaatacccccgagctatccagctccttacgtctggcgctattaaagtcaaacctctcattaccgctgtggccccgcttgaagacggtcctcagtggtttgagcgcctttacagccgcgagcctaatcttatgaaggtggtccttaccccgggcagcgtgtcttaa

SEQ ID NO: 91 - DNA, 1035 bp, synthetic construct
  source 1..1035: mol_type = other DNA
atgaaagcgatggtgttgaaagaatataagtatctggaaatcgaagacattcctattccgcacatcgaagcagcggacgaactgttggtccgcgtgaaggctaccgccatctgcggttcggatatccatggttttgatggttccaccggacgccgtaaaccgccattggtcatgggacacgaggcatcgggtgttgtcgaaagcgtcggaagcgaagttaaatcgctgaaaatcggtgaccgtgtcaccttcgactccacagtttggtgcggcgaatgctacttttgccgacagggtcaggttaacctgtgcgacaaacgacgtgtgcttggtgtgtcgtgcgacgaataccgcaaggacggtacctttgcggaatatgtcattgtgcccgagcgtattgtgtataagttgccggataatgttgccttcgaagaagcagcattgactgagccggtttctgtcgcgatgcacgcatttgatatcaccggaatgaagccaggagaaaatgcggccgttatcggtagcggtcttatcggactcctcctgattcaaattatccgtgcttattcgccccacttgatcatcgcgttcgatacagacgaaaaacgccgaaaagcagctatcgaagctggagccgatattgcattggacccccaagatcctgagtcgcataaaactgtcctgagcatgactaataaccgaggtgtcgaccgagcatttgaggctgtgggcgcctcggcagcgatcggtacagctattgaatccgtccgaaaaggctcgtccgtcactctgatcggcaatattagcaataaagctgagatcccgctccaatctgtggttacgcgccaaattgcccttttgggttcgtgcgctatttctggagagtatcctgtctctttggctttgatggcgaatcgcactattgacgtgcgtcaagttatctccgcaatcgcccctttggaggagggtcctctgtggttcgaacgcttgtataaacgcgaacctggtcttttgaaggttgttctcacgccgtaa

SEQ ID NO: 92 - DNA, 1047 bp, synthetic construct
  source 1..1047: mol_type = other DNA
atgaaggcactccgcctgtacgctccaggtgacttgcgtttggaggaaatcccaattcctttgccacgtcccgatgaggtgttggttcgcgtgcttgcgtgcggtatctgcggttcggatatcccccgtgtttttgaacacggtacgtataaatacccattggtgccgggccatgagttttccggtattgttgaaaaagtcggctccgaaacgggaaaagattgggttggtcgtcacgttgtcgtctatcccctcatcccgtgtcgacaatgctcctcttgctactctggtctttatacccaatgcctcaactacgactacttgggatctcgccgtgacggaggatttgcagagtatgtgactgtccctgtgaataatattatcccggtccctaatggaatctctggagagatctcggcgatcactgagccatgtgcggtcgcccttcatgccgttcgcaaggcccaagcctgcgtgggtgacacggtccttattacgggagctggaaccattggtatcttgatcgccctctgggcgcgagcagcaggtgccgaagtctttatgactgacattgtggtgggaaagttgaaactggctcgttcgttgggttttcagcatctgctggacgccaaacaaacaaatgtttctgaatgggttaagcaaaagtgtaaacacggagttgatatcgtgttcgaaaccacgggacatcccgcgggactcgaaacgtcgattgactcttgttctattacaggcaaaattattctcgtgggcaatcccagcttcgaagagatgaaagttccggctaaacaatatggaatgattctgcgcaaggagatccagattactggaatttggaattcgctcatcaacgaatatccaaaaaacgagtggcaagttgtgctgcaagagttcaagaaggagtcgtccttgtactcgaagattatcacgcataaggttcccattgagggccttaaggaattgtttgtgacgatttacaacaaacaggtctttccggtgaaggctatgtttatcaataaggagatctaa

SEQ ID NO: 93 - DNA, 1014 bp, synthetic construct
  source 1..1014: mol_type = other DNA
atgaaggcagtcgtgtacacgcaaccagacgcagtggccgtccttgagcgtgaaatgcctgcactggtgccaggagaggtgcttcttcgaattgatgccagcggaatttgcggttccgatttgcacgcatatcatggacatgacccacgtcgtaaacctggacttgtgttgggtcacgagtttgcaggcaccgtggttgcttctagcgatgaaagccgcctccctgtgggtcgacgcgtcacggctaatcccctcgttacatgcggacactgtgattactgccttcagggccgtgacaatctgtgtgcgaatcgtggcatggtgggtatgtctcgccctggtgccctttctgagtatcttgccattcccatgcgatgcgctattgctattcccgaagatctgccgagcgtgtctgctgcgcttaccgaacctgctgcgacggcactgcacgcagtcaatcttacaatgcgagcgatgagccgacctctcccggaggcgcgtgttttgattatcggaggtggagcgatcggcatgttgaccggagcacttgtcggtgcgtacggctgtcgctcccttgcggtcgcggaaaccaacgccctgcgccgtgcgtccgtccgacgtcatcttgcatgcgaggttttggaccctacagcgaacgccccggctgagtcttcgttcgacgtggtcattgacgcagtgggtgcggcaccaacccgccatctggcactggcggcaacgcgaccaggaggtgttatcatgcacattggactccaggcatggtccagcgaaatcgatatgcgtaagctcactcttgctgaaatcactctcctcggtacgtatacatacacgatggcggatatgcatgcgaccgtgcgagcacttgcctctggaagcttcggatctctggaatgggtcgagacgcgagccctgacagatgcgccatctgcttttgctgaccttgctgcgggtcgagtcgcggcgggcaaggttgtgcttctcccgcaacaggactaa

SEQ ID NO: 94 - DNA, 1044 bp, synthetic construct
  source 1..1044: mol_type = other DNA
atgaagtccgtcgttattcacgccgaaggagatgtccgtgtggaagagcgacccattccccatttgcaaacggatgaagatgttttggtgaaagtcgtgtcttccggactttgtggcagcgacattccccgcatcttcaatcgtggcgctcattattacccaatcacacttggccatgaattctcgggctatgtcgagtcctatggagcgggtgtcactgacttgcaaccaggtgatgctgtcgcttgtgtgccgctcctcccgtgttttcactgcccccagtgcgagcgaggttacttctctctgtgtaagcagtatcaatttgtcggttctcgcagcgagggaggaaacgcagagtatgtcgttatgaaacgagcgaatcttttccgactcccgtccgatatgccaattgaagacggagctttcattgagcccatcaccgtcggtctgcatgccttccaccttgcgcagggttgcgagggaaagaatgtcattatcgtgggtgcaggcaccattggcctccttgccctgcaatgtgcacgagaactcggagccaaatcgattaccgcaatcgacatcaacccacagaagcttgcattggcaaaggagctgggcgcgacttacgtgtttaattcccgagaaatgtcggcgaccgaaattcactctgatttggaaaatgtgcagttcgaccaacttattctcgaaacggctggaacgcctcagactgtcacgctctccatcgaaattgcgggtccccgagcccaattggcgcttgttggtacgttgcaccacgatttggcgcttgcgtcgggtgtctttggtcaaatcttgcgcaaagagcttactatcctcggatcttggatgaactacagctctccctggccaggcgaagaatgggtcactgcggcacgtctgctgacggagaaacgtttgcaattggaaccacttattgcgcactccggagatgccgaatcctttgcgtctgcagtgaagtctctcaatggcgcacctatgcaaggtaaaattctgctcaagctttcgtaa

SEQ ID NO: 95 - DNA, 1041 bp, synthetic construct
  source 1..1041: mol_type = other DNA
atgaaatctgttgtgaacgatacggacggtattgttcgtattgcagagtcggtgattcccgaaattaaacaccaagatcaagtgcgtgttaagatcgcctcttccggcctttgtggttctgacctgccgcgcatttttaagaacggagcacactattatcccatcactctcggacacgaattttcgggatacatcgatgcagttggctccggtgtcgatgatcttcatcctggtgacgccgtggcatgtgttccccttctgccctgttttacctgtccagaatgtctgaaaggcttttacagccaatgtgccaagtacgattttattggatcccgtcgtgatggtggtttcgcggagtatatcgtggttaagcgaaaaaacgtgtttgctttgcccactgacatgtctattgaagatggagcctttatcgaaccaattacggttggccttcacgcgttccacctcgcgcaaggttgcgaaaataagaatgtcattattattggcgccggtactatcggcctgcttgcaatccagtgtgccgtcgctctcggtgccaagtctgttaccgccatcgacatctcgtctgaaaaactcgccctggccaagtcttttggagcgatgttgacgttcaattccttggagatgtccgcccctcagatgcaaggagtcctccgagaattgcgattcaatcagttgattctggaaaccgctggcgtgcctaagaccgtggaactggcggtcgagattgctggaccccacgctcaactggccttggttggcactttgcaccaagacttgcatcttacgagcaccacttttggaaaaatcctgcgcaaagagcttactgtcatcggatcttggatgaattattcgtccccttggcctggtcaagaatgggagactgcatctcgtctcctcaccgagcgaaagttgtctctcgaaccgttgattgctcatcgtggcagctttgaatcgttcgctcaggctgtccgagacattgctcgcaatgccatgccaggaaaagtgcttctgattccttaa

SEQ ID NO: 96 - DNA, 1020 bp, synthetic construct
  source 1..1020: mol_type = other DNA
atgaaatctattctgattgagaaaccaaaccaattggccattgttgaacgtgaaatcccaactccatccgccggtgaagttcgtgtgaaagtgaagctggcgggaatctgcggatccgattcccatatttaccgtggtcataacccatttgcaaaatatcctcgtgtgatcggacacgaattttttggtgtcattgacgcagtcggagaaggtgttgaaagcgcccgcgttggtgaacgagttgcagtggatcccgtggtgtcgtgcggccattgctatccctgctctatcggaaagcccaatgtttgtactaccttggcggtgctgggcgtgcatgcggacggaggcttctctgagtacgcggtggttccggccaagaacgcgtggaagattcccgaggcagttgccgatcaatatgccgtgatgattgagccgtttacaatcgccgcgaacgtgacgggacacggtcagccaactgaaaatgacactgttctggtgtatggcgctggacccattggcctcacaattgttcaagtcctgaaaggagtgtataatgtcaaaaacgtgattgtcgccgatcgaattgacgagcgacttgagaaggccaaggaatccggagctgactgggctattaataatagccagacaccgctgggcgagattttcactgaaaaaggcattaagccgacgctgattattgatgccgcttgtcacccctcgattctgaaggaggcggtgacgctggcttctccagcggcacgtattgttctgatgggattctcgtctgaaccatctgaagttattcagcaaggaattacgggcaaggagctctctattttctccagccgccttaacgcaaacaagttccccatcgtgatcgattggctctccaagggcctgattaaaccagaaaagctcattacgcacacgtttgattttcaacatgttgcggacgctatcagcctttttgagcaagaccagaaacactgctgtaaggtgctgctcactttctccgagtaa

SEQ ID NO: 97 - DNA, 1074 bp, synthetic construct
  source 1..1074: mol_type = other DNA
atgaacattccgaccaagatgaaggcagtcgttaaatcggaggcaggttatgacaatatgtccctgcaagagattcctgtcccagaagttaagggaaaacaggtgttgatgaaagtcgcctatacgggtatctgcggtacggacattcatacctttaaaggcgagtacgccaatgccgtgaccccacttgtcctcggccatgaattttctggcaaggtcgttgccgtcggagatgaagttaccaaggtcaaaccgggtgaccgagttacctccgaaacaacatttgatacatgcggagagtgtgtgtactgtaaaaataaggaatataacctgtgcgaaaaccgttcgggtattggtacgaaagccaatggatcgatggctaattatgtgcttacgcgagaggagtctgtgcatgtccttcctgacaatgtttcctacaaacttgccgcgatgtctgagccgctggcttcctgtgtgcacgcaatgtaccagaaaaccccgttcacccttcatgatacagttctcattatcggccccggacctatgggtttgctctctctgcagattgcaaaggaaattggagcctttaccatcgtctccggtattacgaaagacagcgaccgcctggaaatcgcaaaagaacttggagccgacatcgttgttgacacgcagaaggaagacttggcgaagatcgtcatggaggctactaacggagtgggagttaccaaagtctatgattgtagcggcgctacaccagcggtgaatgctgccctcccccttctgaagaagggaggtacttttcagcaggttggcctgtttgcaaagcctctgaacgaattggatgaacgtacaattattcagcacgaaattacatacgtgggatcccgttctcagaatccgtatgattggcctatcgccattcacctggaggccaaaggtgctattaatgaagataaaatggttacgaaagtcttcgatttggatcattggcgtgaggcattcgaggctatgatggctggaaaagaactcaaggttcttattgccagcaatccagacgacgaaactcttaattaa

SEQ ID NO: 98 - DNA, 1053 bp, synthetic construct
  source 1..1053: mol_type = other DNA
atgaaagccgcggtcctccatggaacgaacgacatgcgcttcgaggatattgaaatcaagccgtgcgaaagcgacgaggtcaagatcaaggtcatggccgctggcatttgtggatctgatcccccccgagtgctgaaacattggaagtatcctgttccggctattcctggacatgagttctctggtgttatcgcggaggtcggaaaagatgtgaaaaatgtcaaggtgggtgaccgagttgtggcgatcccctttattccgtgtaatgaatgtgagtactgtaaacgaggtctttttagcctttgtgacgatcacggaatgctgggtgccaaatcctttggagcatttgccgagtatgtgaacattaaggcgactaatgtccttcccatcggcgatatggatttcgaagacgcagcgatgattgagccccttgccgtcgccatgcacggagtgttgaacatcggagttcaagtgggagatacggtcgccgtcatgggctcgggcacaatgggtcaacttgtgattcagggtcttaaaattgctggtgctggcactatcattgctgttgacatttctgataacaaactgcgagagtccaaggaattgggcgctgacattatcattaacgcaaaggacattaaccctgttgaaaaaatcaaagagcttacaggcggaaaaggagtggacatcgctctggaatgtgcgggttccaaaattacccaagagcaatgcctcttgatcactaaaaaaaagtcgaagatcggtttcctgggaattgcgtactctgacattaccttgtcggaggaggcgttcgagaacatctttcgcaaagagctcgaacttaaaggattctggaacagctattcggcaccctttcctggccaagagtggaccaagggcattaatcttgttaacgagggaaaaattaagctgaaggaaatggtttcgcaccgcttttctcttgaggatacgtataaagcgttcgagatgatccgagatcgcaaggaagagtttaacaaaatcctgatccttccccagggcgtggaaaaataa

SEQ ID NO: 99 - DNA, 1053 bp, synthetic construct
  source 1..1053: mol_type = other DNA
atgaagtcggtccgattttatggaattcgtgatacacgagtcgaagacgttgacgtgcccaagattctggaaaaggatgacgtcattatcaaggtcaaggtggcgggcatctgtggttctgacattagcaaatactcgaaaacaggcccgcacatggttggcgagattttgggacacgagttctccggcgaggtcgctcaggtcggcaaggaagttcgctccttcaagatcggagatcgagtcgcagtttgccctgcgatgccctgcttcgagtgtgatgagtgcaaaaaaggtttgtattcccgttgcaataatgtcgctatcatcggaaataaggagctcggaggatgttttgcggagtacacgaaagttaaagagcgcaatctgattaaaattccagatgagattagctacgaaaccgctgcggcccttgaacccgtctgtatcgcaggacatggtcttttccgctctgaagccaaggtcggagatacggtcgttgtgctgggaacgggtcctatcggattgttcagcattcagtgggccaaaatctttggttccacgaagattatcgcggttgacgtgtttgacgaaaaactggacttggcgaaagagctcggtgcggatatttgtattaatgctaaggagaaaaatatcgttgaagagatcaaacgactgacagacggagatggtgcagatattgtcattgagtctgccggtaccccgcttacatgtggccaggtgcttctgctggcgaaaaaaggtggtactgtcttgtatgcaggcgtcccatacggcgacgtcgcccttactcgagaacaatttgagaaaatcgttcgaagcgagcttacggtgaaaggaacttggtttggcaattctttcccatttccgggaaaggaatggtctgctggcctgtaccacatgcagaaaggagacatgaacgtggaaaagcttgtcactcaccgtatcaatctggaagaagctccagcatacttcgagaaggtttataaacgtgatatcttctttggtaagattatgattaatattgacaattaa

SEQ ID NO: 100 - DNA, 1050 bp, synthetic construct
  source 1..1050: mol_type = other DNA
atgaaagcttccatgctggaggacttgaacaaattcagcgtcaaagagatcgacatcccgtcccccaaaaaggatgaggtcgtcgtgaaggtgatggcggcaggcacgtgtggatccgattcgcataaaatgattagcggatggaaatatggctatcccgcggtgatgggacacgaattttctggaattgtgacacaactgggagaaaacgtgtccaacgtcagcgtcggtcaacacgtcgccgtggctcccttcattccctgcttcaagtgtcattattgtcaaatcggactcttccagatgtgtgaaaattattccatgctcggtcagcaaaaatttggaggtttcgagcaatacgtttccgtcccggcacgtaacgttctggacatcggcaagatgtcgttcgaggaaggtgcccttattgaaccgatggcagttgcggcccacgctgttatgggaattaaaccggagctgggtgatacagttgcggtcttcggcctcggtacagtcggagatcttgttgtccgtcttcttatttcctcgggagcgacaaacgtcattggcattgacattgacgaccagaagcttgaaaagggactggatgagggttgcacacacgtgatcaactctgccaaagagtctcttgaagaaaagatcatggaatacaccgacggtctgggtgtcgatatttccatggaatgcgccggcagcaaaatcactgaggagcaaacactgctcgttacgaaacgccgtggaaaggttggatttgtcggtattgcttatagcgacgttctgctccatcagaaagcatttgagaacatcttccgccacgagcttacggtgactggattttggaattcctattccgcaccatttcctggacgcgagtggaccaactcgatccaattggttaatcgtggtcgtatcaagatcaaagatctcattactcatcgatttgagcttgaagacatgcaaaaagcattcaatatgatcaccactcgttcggaatcgtttaataaggtcatgtttttccccaacggcatcaattaa

SEQ ID NO: 101 - DNA, 1065 bp, synthetic construct
  source 1..1065: mol_type = other DNA
atgaaggctctcaatttgtacggtatccaggacctccgctttgaggaaacacccgctccctctatcgaacatgatgacgatatcattatcaaagtcaaggctgtcggaatctgcggatccgatttgtcgcgttataagaaactgggaccttatgtccctggaatgacttttggacacgaattcgcgggagaggtcgtcaaaattggtcgttccgtgacgggattttctatcggtgatcgtgtcgctgcttgccctacttatacttgcggccagtgccgttactgtcaactcggcgagccgacacgatgtgagcgactgtctgtgatcggcgcacgccacccaggtgcatacgcagaatacgtcaaacttcccgcgaagcatgtcatccccttgcccaacgttgttaactatgacgaggccgccctcattgaaccggcttcggttgttgcgcacggcttttatcgtactaacattaagccaggtgcaagcgtcgctattatgggcgttggctcgatcggtctgctcgccgtccaatgggcaaaaatcttcggtgcgacaacggtctttgccattgatattgacgaacagaaacttaacgtcgctaatcaacttggagcagatgtcttgatctccagcctccaacgacccgcacacaagcaaatccttgaatataccaacggaatcggtgttgacgtggctgtggagtctgctggtacaccttctacctccgcccaggtgtttgcgctgccgaaaaaaggtggtgaagttgtctttcttggtattccttatgccgatgtccagattgaacgattttacttcgaaaaaattgttcgtaatgaactgcacgtttacggatcttggaatgcactctcctccccattcccgggtaaagagtgggccacgactatccattatatgtcgtccggacaattgaatgtcgcgcccatgatttcctaccgactccctctcgctaagggccccgagacgttccagcagatcgcaaagggtgaactcaagcccacaaaagtccttttctatcctgagaagttgtctgagcgcaagtaa

SEQ ID NO: 102 - DNA, 1056 bp, synthetic construct
  source 1..1056: mol_type = other DNA
atgaaagtccttagcctgcataagcctggcgatattcgatttgaggacgctccaatgcctgagccaggagagggcgaagtgctgctgaaagttatggcatgcggcgtctgttcgtcggacgaggctcgaattttcaaggacggtgcccatattatgccaattgttcctggccacgagttctgtggccaagtggtgaaaacgggagcaggagtggacgaaagcctcatcggccgaaaagcgagcgtcttcccaatgcttccctgtttcgaatgcccttcttgtaaacgaggtgactacgcaacctgttctaactataaatactatggttcccgcaacgatggtggaatgggagaataccgagcaatcaaggcgtggaacctgaaccttctggatgattccgtcgattattgcgtcggcgcactgtccgagccatccgcggttggccatcacgccactgaagtgggaggagtgaaagccggagacaaggttttcgtcattggtagcggaaccatcggacttttgatcggcttcttcgctcaggctaagggtgcagaggtttggatcggtgcgcgtcgtaaagagagcaacgatttcgcggcgagcctgggttttaaaacgatcgacaccaataataccgaagacgaggttgcaaaggccacggatggtaacggcatggatgttgtcttcgaagcagttggtagcaataagtgtcttattgaagctattggatctgtcacggcgggaggcacacttgtcaccgtgggcaatcctgtgggagacatgaatcttccccgagatgtgtactggcgcatcctccgaaagcaactcacggtccgaggtacttggaactctagctactctgacaaggccaatgactggcacgaagtggccgcgttgatgaaagaaaaaaaaatcccgttcgaaaaactcatcacccgtaagtacaaactttctcaatgcgatgaggccttcgattttttccgtgaccactctattcagaagtcccgcgtgatgtttgttatgcacgaaaaagaatccgaagcttacaacggataa

SEQ ID NO: 103 - DNA, 1011 bp, synthetic construct
  source 1..1011: mol_type = other DNA
atggtcaacatgatgaaagccctcgtgtttactgcgccccatacgttcgagtatcgtgacgttccccgacccgaacccgcccccgacgaggtcctggttgaggtgaaagcatgcgcaatttgtggttctgatgttcacggtagctcgggcgaaaacggtcgacgcattcctcccttggtgatgggccatgaggcaagcggcactatcgcacaattgggcgaagctgtgcagtcgtgggcagtgggagatcgcgttacatttgactctactgagtactgcggctactgttggttttgcacgcacggtatgcacaatttgtgcgcccagcgacgtatcgtgggcgttgcgtgcacagagtaccgtaaaaatggtgcaatggctcaatacattgcagtgaaagcccgtaccctttatgctttgccgccggcggtctcctttgaacagggttgccttgtcgaaccctttgctgtgggtatgcatgctgtcttgcgatctggactggcagcgggacagacggccgctgtgattggagatggaacaatcggtctgatgactcttattgcggccaagagccagggagcacaagtctgtatcagcggacaccacacccgtcccatgcagctcgcagcccagctcggagccctggattgtgcccaactgccccagctgacagctgagcgaggtgcggacgttgtttacgacgctgttggctctcaatccagctttacgcaagcgatggagcttgtccgtaagggaggccgaattatggttatcggcaatcatgcacgcacgatcgattttcctttgcaacgttgtatcacggaacagatcgacgttcagttttcgtacagctctgccggtgagtatcctgtttgtcttcaagccattgctgagggacgcgcagatttgacaggactgtggcaatctttcccactggctgagggcgctcaagttttcgaccgcctggttcaccgagatgagtccctgacgaaagccgttttgatcccataa

SEQ ID NO: 104 - DNA, 1074 bp, synthetic construct
  source 1..1074: mol_type = other DNA
atgaaggcctatgttttggatggtattggccagctgaatcaacatgagtatgtcctccgagacttgcagcctggagaagccctcgttcaagtggctgcggctggtatctgcggtagcgacctgccccgcatctttgagactggaacttatcattttccaactatcccaggccatgaattcgcaggtgttgtcaaagaactttatgctgatgccgacgaagaaatgctccgacaatggatgggtaagcgcgttgcggtgtttccactgattccctgtcgaacctgtcgaagctgcgcgaatcatcagtacgagatgtgttctaactataattacctcggctcgcgtacggacggaggcttcgctgaatactgtatcgtgcctgtttggaacttgttgcagttgccggacgaggttagcttcgcacaggccgctatgatggaaccggcagctgtggcattgcatgcaatccgacgtggcggcctgcaccccgaccaccccgagaccggtatcggcaagcgtgttctggttatgggacttggcactattggcggattgatcgcccagtggcttagccaatgtggcgttacggagctcaccgccactggtcaccacgccccccaggaagagcttatgcaccgatatgctaacgagaactaccgattcattaatactaatcaaactgcttggaccgatgacgaaaacacctacgatcttatttttgactgcattaatgacagcgaatccgttcagcaggcgttgcgctacgtcaaacccggtggtcagattgttgctgttggcaacccgaaaaaagatcttactcttcaaaaggacatctattggaaactcctgcgaaaacaagtgtgtatgaccggaacatggaactcgagcttcagccatgattcgaacgatgactggcagatcctccttcgataccttcaggagcaaaagctgcatccgcaggcacttatcacacatcgccttccgtttgcccaacttcccaagggcttggagatcatgcgtcttcgtgaagagttttacaacaaaattatgatcgacttgactgtctgttcttaa

SEQ ID NO: 105 - DNA, 1029 bp, synthetic construct
  source 1..1029: mol_type = other DNA
atgaaggccgtgacttacactcccgaccagggttttgcattggtcgaggttgagacaccccagcttggacctgacgaagttcttctccaggtggaggcttgtggcgtctgcggaagcgaccgtcaagtcgttgcaggcgaatcggttcctaccggtaccgccttccctctggtgatgggccacgagattgccggacgtatcgccgcgttgggcgaaactgtgacagattggcatgttggagactctgtgattgtccatcccttcgtggcatgtggtacgtgcgcaccctgtgttcacggccagcctaacttgtgcgtccgacaggtgtgtattggttatcaacgacctggaggatttgcagagcaagttgctgtcccggctcgtcaactggttcgacgtccagcagaattggcaccggccgccgcagcattggttgtggatgcgtttgccacgccataccacgcgatgcgagcggcgggtgttgagagcggccaaaccgttttgattattggaaccggcggacttggtctcgcggcacttatgctggccatgggcttccatgtcggccgtctgggcgcggtcacgcgacgccaagagggtattgcaatcgcggaggctcatggcgcgcagatggttgtcgtcacggaccaggatgagcgtacaattgcgcgccagcttcgccgctggtctggcgcatccggcattgacgtcgtcatcgatacggtcgctactgctgacactattacattggcagctgaaagcgttcgcccaggaggcactatcgctattgtcggaatgtcggccgacaccgccctctatcctgtcgctaagaccgttcgccgaggtctgacattcgttgcgagctacggatccgtccgagaggatgtcgagcagttggtcagctgggtggcagaaggtcgactggacccggttcgactcgtcgcgggagccctcccactccatgaagccgctcgtgcattcgccccggaccgacccgccggacgttgggttattgatccatctgaataa

SEQ ID NO: 106 - DNA, 1074 bp, synthetic construct
  source 1..1074: mol_type = other DNA
atgaaaagcttgattaatatcccggaaaaaatgaaagccctcgttttgtatggtgttggtgatttgcgtgtcactgaagtggacgttccgaagctcgaaaaaggaacggtcctccttaaaattaaagcttgcggcatctgttcctccgacatgcctcgttgtttcgttactggcacttaccattttccgaccattccaggacacgagttctctggacaaatcgttgcggtgggtgatgatgttgatgaatccttgttgggaaagcgttcgtgcgttttccctatgcttccctgcaaacactgcaaagcttgcaagatggaggaatatgctcagtgtagcggctattcttacttcggctctcgccaagatggtgcctgggcggaatacctcgtggtcccggtgtggaacctggtgccctttgacgatacactcgattataaaactgcagccctgtgcgaaccagctgcggtctctatgcacgccgttaatattggagacattaaagaaggtcagaatgttgtgatcatcggaacgggtaccatcggattcatgattgctctctttgccaaagaacgtacgaaaacaggaaaggttgtgatcgcgggacgctcgaaaaataagctggaatacgcgaaaaagttgggcttcgatgtcgttgacacctcggttgacgatttgcctgcccaagtgaagaaaatcatcggtattgatggagctgacgtcacattcgaagcggtcggctccaatgaggccattgcctctgctattgaatctacgggcgctttgggttcgattgttcttgtcggtaatccttccactgatctcatcttgccaaagaatatttattggtccatcctccgaaagcaaattacagttaaaggttcctggaactcgtcttataactctcgcgttaatgactggaagaaagcgttggaggtgtttgagcatagcgacgtgaattttgcagacttgatcacacacacattcactatcgaagaaaacgagaaagctttttctgccatccgtaacactggagaattcactctcaaagtcatgtttaccttcgatgattaa

SEQ ID NO: 107 - DNA, 1047 bp, synthetic construct
  source 1..1047: mol_type = other DNA
atgaaagctgtcgtcctgcatggtaaaaacgacatttgctatgaagaatggcctgaacccatcctgaaaacaggaacagttaagattcatgtcaaggcttgtggcatttgcggctctgacattcctcgcgttctcggagattctgcccattactacccgatcatcctcggccatgagttctccggttgtgtcactgaggtggctgatgacgttgacaagatccaggttggcgatcatgttgcaggagtcccccttctcccgtgcatgaaatgcgatgattgtcaacagggaaactattctcagtgtaaacattactcttttatcggcagccgcgagcaaggtggatttgcagattatgttgtgatcccagccgataacgtggttaaagtcgacccaactcttccttacgaacaggtcgcactcttcgagccttgtactgttgctttgcatgcactcaaagtctcctcgtataaaggaggaaaacgagtggcgatcctgggtggcggcacgattggtctttttgcactccagtgggctaaaatctatggcgcgtcccaagtcacagtcttcggtcgcagcaaggaacacttgaagatcgctgctgctctgggtgccgacacaactatttccactctggacgataattttatgacagaggctatgcgagtcacagagaaaaagggttttgactacatttacgagtccgccggttccacaatcaccatgaagcttgcttttgaactggcagccaaccacgcgaaaatctgtttcattggcacgcccacggaaaacctgactttcagccctaagctgtgggagaacatgaatcgaaaggagttccagcttatgggttcctggatgtcgtgttcggcgccgttccccggcgatgaatggaaggagacagcccatttctttaacaccggacaacttcgatatgtgcctgagatgtttttcgcacagtatcccatggacgatgttaaaaaagcgttcgagcagttccataacaagaataaagttaagggacgtatcctgctcaaaaacaagtaa

SEQ ID NO: 108 - DNA, 1014 bp, synthetic construct
  source 1..1014: mol_type = other DNA
atgaaagtggcggtttggtatggtgacaaaaatattgtcttggaggaccgtccgatcccttctatcggtgaaaaggacgtcttggtccgtgtcaagtcgtcttccatctgcggagctgaccttcatgcctacaaaggcctctctaagcgccgcaagcctccattggtgatgggacatgaattttccggtatggttgaacgcctcggcgatgagacaaagggccttaaggtcggcgatcgtgtcgtggtggagcccattattagctgcggaaagtgcaaggcatgcaaaaagggaaaaacgaatgtctgcgaaaatcgtaagctgatcggtctgaacctcgacggtgctttcgctgaatatgtttctgtcccttatgaaaagtgccatgaactcccccgtgacctttcgttcgatgagggtgcgattatcgagccgttggccgtcgccgttcatgcggtcaatattactcccatctcgtcgaacgataacgtgcttatcattggtagcggtgtgattggcctcctcatcacacaattgcttcgaagccgcacttcgggcgacattttggttaccggacgtcgcgattacctccttgaaaaggcccgtgaatttggtgccacagatgcaatcaacgtgatcgactgcgatgctgtgaaaacgctgctcaaaaaacacggtcgcgtcgatgttgtcttcgaagcagtgggctctaacgagactgtgaaccagtccatttccctggtcgaatctggaggttctatcactctcgttggcatgctcgatcgcgagatgaccgttgatatgatggaggttgttgcccgtgaaatcactctgcgaggagattatggttatacaactgacgactttaaggaggcgatcgagctcgcttcttcgggtaaagttgatctcaaaggcctcatcacgcatgttctcccgctcgatgagatcaaaaagggcttcgatatcctggcagaacgccgagaaaatgtgatcaaagttgttattaacccataa

SEQ ID NO: 109 - DNA, 1032 bp, synthetic construct
  source 1..1032: mol_type = other DNA
atgaaagcactggtgttggaggaaatcggtaaattgacccttaaagaggttgagacgcccgtgccaggacgcggagaggttttgttgcgcatccatgcctgtggtatttgctcttcggacaaagcccgtctcttcaagaacggtactcacaccatgccgcttatcccaggtcacgagatctcgggtgagattgttgcaggaggtcccggcattcgagaagagcttatcggccgacgcgctgcggtcttcccgttgattccttgtcgccaatgcgactcctgccgaatcggcaagtacgctcaatgcgagcattacgactatttcggatcgcgtcgagacggaggctttgctgagtacctcgctgtccccgtgtttaatatcaatcttcttcccgatgatatggattatcatacggctgcattgtgcgaaccagccacggttgcatctcatgcacttaagcgcgccaaaatgaaatctggtgatatcgttacgatcattggcactggcacggtcggcctcctggctgctggcatcgctcgtattcgacgagcatctaaaatcattatcgtcggacgaagcaaagaaaaaatcatgaatgcagctcatttcgctgatcatgtgatcaatgcagagggatgggacgtgaacgaggccgtggcttcgctgacggagggtcacatgagcgatgtggtcttggagactggcggcaacagcgatgcttgcacgtacgcgcttatggctgccggcaaaggtacgactgtgatgtttattggcaatcccgaagaaccgattgtttttaaccgtgatatttattggaagatcctccgaaacgaactgacactcaagggtacttggaattctggatatgctcctgaggataatgactggaatgacgtcatccgttatatggcagatggacagattccggcagataaaattatcaccgatagctttccattggaagattataataaggcattcgagcttcttctctcggatcgcttttacaccaaaatcatgtttgacatctaa

SEQ ID NO: 110 - DNA, 1047 bp, synthetic construct
  source 1..1047: mol_type = other DNA
atgaaagccaatgttctgtaccacattggtgacctgcgatacactgacgttgccttgccggaactccacgacggtgaggccctcgtgcgagttcgtgcatgcggtatttgtggtagcgatgttgcccgagtcttcaccactggtacgtatcatttccccaccattattggccatgagttctcgggcgaagtcgttgaaacatattctgcggctgacgcggagtgggtgggtcgccgcgtgagcgtttttcccctcatcccttgtcgccattgtgatgcctgtcatcatggtcagtacgaaatgtgcacatgttacaactatctcggcagccgtaccgatggaggcttcgcagagtacgtggctgtcccggtctggaatctctttcgtctgccagattccgtgtcttacgaggagggcgcaatgatggaaccggccgctgtcgctatgcacgcgctcaagattgcccgtgtgggtatgggtgacactgtggcaattacaggtcccggaactattggtatgattttgacccaattgatccaacgtattggcggtacaaaagcggttctgatcggacgcacccaagcaaaattggattacgcacgacgcatcggcatccgtcatgtgtgcaattcgggaaccgagcacgtcgcggaccgcgttggacaacttacaggcggacgtggagccgacatcgcaattgaaggaaccggtgcgtcggaacccatgaatctgtgcttgaatttggtgcgctctgaaggacgtattgtcgctatgggaaacccccaaggtgacatgctgttccgaaaggatgcgtattggaagcttctgcgcaagcagctgacccttcgtggaacctggaattcgacatatggattgggccgagatgattggcaggatatttccgcccttcttgctgagggagcattgaacttgcgcggccttatcacacaccgactcccactggccgagctgcagcagggactcagcctcatgcgagacgcagcagtctacactaacaaagttatgatcgtcgacgagcaaggttaa

SEQ ID NO: 111 - DNA, 1014 bp, synthetic construct
  source 1..1014: mol_type = other DNA
atgcgcgcctatgagcttcacggagtcaacgacttgcgtcgcgaggacatcgaaaaacctgagattccctctggatgggttcttgtgcaagtcaaagcgagcggcatttgcagctccgacatccctcgtatcttcacgaacggcacttatcactttcctaccattccgggccacgaattctctggagtcgtggccgcctatggcgaaggtgtcccggaagaacgcgttggcaaacgagtgggtatttttccgctgatcccgtgtcgtacatgtccccaatgccgccagaagaaatacgaaatgtgcgagcactatgattaccttggctcgcgtcgtgacggcggattcgccgaatacgttgcagtcccggactggaacctcctggaattgccggagaacgtttcgttccgcgaggcggcgatgctcgaacctctgtcggtggcacttcatgccgtgaaacgcagcggcgtgaaacctggtgatacagccgctgtgatcggcacaggaatgatcggttttgccgcagctgcttgggccaaagcactgggagcagaaacggtgttcgtgattggacgcggcgaggccaaacgcgctattgctgaacaaattcccggaatttcctatgtgactgaagaggaatccaaggccattcaggcggacgtggtcgtcgaagcagttggtacaccacaggctgtttcctccgcggtgttgcttgcacgaccgggaggttccattgttctgatgggcaacccatccggtgatcttgcgatggaaaaaaacgtctactggcgtatcctccgtaagcaacttaacttgatgggaacgtggaatagctcgtatgaaaaagacgaagcctgtgactggaccgaagcgctcgacgcattgtccaagaaaaagattcctgcccaagcacttatcactcattgttttcccagcgaaaaacttatggatggactggaattgatgaagaatcataaggaaccatactgtaaagttatggtcagctgggagtaa

SEQ ID NO: 112 - DNA, 1065 bp, synthetic construct
  source 1..1065: mol_type = other DNA
atgaagcgtatgcgagctgccatcttgtatggaccaaaagacatccgaattgaaaacattgagatgcccaaggttaagccggagtgggtgcttattaaggttcgcgcaacaggtatctgcggttctgatctgcacttttacaaagagaagagctttattcctattattagcgacgtgggcaaaggacgctacgtccccggtcatgaattttcgggcgaggtctacgagttgggttcgaaggtcaaaggcctgaagaaaggagatcgcgtcggcgtcgaacccatcattggttgcggcaaatgtcagtggtgcaaggtcggatgttacaacttgtgtgagcactacaaattgattggctttcactatattggaggtatggctgagtattgtgttgctcctgctgagaattgttttaagctcccaaacaatgtttcgttcgaaagcgcggcaatgcttgactgtatcgccgtggctattcacgcagtgaataaagcagaaattcgcggcggtgacagcgttctcattgtcggcgccggtgccatcggactcttcgccctccaggcagcgctcatccagggagcgagcgacgtgtacgtcgttggaaaatacgaattccagttggagaaagctcgcaagttgggagcgacagctgtgattaacgctaaaaacgaatctttctccgaaaaaatcatggaaattacttcgggtaaaggagtcgataaggtcattgaggccgtcggcggagcctccaatgttatttctgacgtccttgacgtgactcgaaaaaagggtactatcgtgaccactggtatctttacacgaccactctcggtcgattttttcaaaattctcacaaaagagttgacgatcacttcgtcgtggggatactgttacttcgaccgtcgcaaggagtttggcacggcgctcgactttctggcaaaagaaaagatcaacactcaggaacttattacacataagtatcctttggagaaggtttccgaagcctttgagacggcactcaacaaaaataaggagaagagcatcaaggtggagattatcttctaa

SEQ ID NO: 113 - DNA, 1053 bp, synthetic construct
  source 1..1053: mol_type = other DNA
atgaaagcctgggtgctgcacggtatcggagatatccaatacgaggaagttaaggagccgcagtcggctggcgacgaggttattatgaaagtgatgagcgtgggaatctgtggatctgacatccctcgcatttataaaaccggcacctatcatttcccaacaatccccggccacgaattctccggtattgtggccgatgttggtgccggagtcaacccgaaatggaagaataagcgcgtcggcgtgtttccattgatcccatgtcacgtttgtgcttcgtgtaaaaaaggtcaatatgaaatgtgtcgcaactacggatatctgggtagccgccaaaatggtggttttgcagagtatgcggcggttcctgtcaagaatctcatcgaactcccggactctgtctctatgcaggaagctgccatgcttgagccgatggccgtggcagtccatgctatgcgacgagcccgtcccatgaccggagatcgtattgtcgtgtgcggacttggaactatcggcatgcttctcgtgtcctttttgcgagagacgggaattcgagacatctttgtcatcggcaataaggcattccagcgaatcaccatcctcaaaactggcctgcaggaaaactgttattgtgattctcgcgtgcaggatgtcgagaagtggctcatggagcgaactgaaggaaagggcgcagacgtgttctttgagtgtgttggccgaaacgaaaccatctcccaagcagtcaacctgacggcacccggaggttcggtctgtctggttggtaatccttgttcggatatgacgcttgagcgtgaggtctactggaaaattctccgtaaccagcttactattactggcacctggaattcctcgttcacccacgagatcgaggacgactggcattacgtgttggatcgcctggaacaaggtaagatctcgcctggtgatctcatttctcacaaattcccgctcaagaacttggaatctggtctgcatattatgcgtgataagactcaagattatatcaaaatcatggccgagattaatgtgtaa

SEQ ID NO: 114 - DNA, 1047 bp, synthetic construct
  source 1..1047: mol_type = other DNA
atgaaggccgcagtgctccattccgaaaatctgtttacgtacgaagaagtggaaatcgatccctgcaaagacgacgaggttaagatcaaggtgatggctgcgggtatctgtggttccgatacacataagatgacgagcaaatggaaatatccccttccgaccatcatgggccatgagttttcgggctttatcgtcgagattggtgaaaaggtcactaacgcgtcgattggcgatcgagttgtggcgatccctttcttgccgtgcaatgactgcgaatactgtaagcgtggacaattctcgttgtgcgaggatcacggcatggttggatccaaaagctttggtggtttcgcggagtacgtcaatatcaaaagcactaatgttcttccgattggtgacatggattttgaggaagcagccatgattgaacctctcgcagttgcgcttcacggcgtgttgaatattcatccgcgtattggagatattgcagccgtctttggtattggcacaatcggaatcctcacaatccaatggcttaaaattgcaggagtgaaagaggttattgcgatcgacatttccgataacaagctcgcagacgcccatgctatgggctgtgagcgtactatcaatccatttaaagagaacctccttgagaaaatcgacgaatatactaacggtcgcggtgttgacatcgcctttgagtgtgctggatctaaagtcacacaagaacagtgcctgctcgtgacagccaagcgaggaaaagtcggctatttgggtatcgcttactctgatgtccatttgtcggagcaagcttttgaaaacattttccgccgcgagctcacacttaaaggattttggaactcttactccgcaccattcccgggagaggaatggaccaaaagcattgacttcattaataagggtcgtattaaactgaaagagctgattagccaccgatttaagctccaagatactcagaaagcgtttgacatgatgatcaaccgagaagagacatacggcaaggtgcttattttgcccaacaaagagtaa

SEQ ID NO: 115 - DNA, 1047 bp, synthetic construct
  source 1..1047: mol_type = other DNA
atgaaggcggcggtgcttcattctgagaatcacttcatttatgaagaaattgatattgctccttgtcaagatgatgaggttaaaatcaaagtcattgcgactggaatttgtggatcggacacgcacaagatgacaggcaaatggaaatatcctctccccgccgtgatgggacacgagttctccggatatatcgttgagaaaggaaagaacgtcactaatgcagccatcggtgaccgcgtcgtggcgatccctttcctcccgtgtaacgactgtgagtattgtaaacgtggccaatttagcctttgcgaagaccacggtatggtcggctcgaagtccttcggaggttttgctgagtacgttaatattgagtcttcgaatgtccttcccatcggagatatggaatttgaagaggcggccatgattgagccgctcgcggtggcccttcatggagtcttgaatattcatccgcgtgttggcgacgtcgcggccgtgttcggtgtcggtaccattggtatgctgaccatccagtggctgaaaattgcgggtgccaaggagatcatcgcaatcgacttgtcggatgaaaaacttgctgacgcgcgtgctatgggttgtgaacgtacgatcaatcccctgaacgaagaccttcttgaaaaaatcaacgaatacaccaacggaatgggagttgacatcgccttcgagtgtgctggctcgaagattacacaagaacagtgccttcttatcacccgcaagcaaggcaaaattggatacctgggcattgcttattccgatgtccacctgtctgagaaggctttcgagaacatttttcgacgcgagcttacgttgaaaggtttctggaattcgtattccgctccatttccgggtgaagaatggacaaaatcgattgaattcattaaaaacggccgcattaagttgaaggaactgatctctcaccgatttaagctggaggatacacaaaaagcatttgatatgatgatcaaccgtgaagagaaatatggtaaggttttgattcttccgaacgaggagtaa

SEQ ID NO: 116 - DNA, 1053 bp, synthetic construct
  source 1..1053: mol_type = other DNA
atgaaggccgcggtcctgcactccgaaaatgagattatttaccaggacattgaaatttccgagtgtcaaccaaacgaagtgaaagttaaggtcatggcggctggaatctgtggttccgatacccataaaatggtgagcaaatggaaataccccctccctgcgatcatgggtcacgaatttgccggctacgtcgttgaaaaaggcaaagacgtgacgaacgtcgaaattggcgatcgtgttgccgctatcccgttcatcccatgcaacgagtgtgagtattgcctgcgaggtcagttcagcctttgcgaaaatcacggaatgatcggcagcaagtcctttggcgcatttgccgagtttgttaatattccagctaagaacgttctcccgattggcgaaatgtctttcgaagatgcagctatgatcgaaccgtctgcggtcagcctgcatggagtgctcaacattcacccacagctcggcgatgtcgttgctgtcttcggtgtgggaactattggaatcctcgcaattcagtggttgcgtgtcgccggcgtgaaagagattattgctattgacatttccgacaagaagctccaggacgctatggatctgggttgtgagaagtcgattaaccctttgaaggaagacttgattaagaaaatttatgaatacacgaatggcctcggcgttgacatcgcatttgaatgcgctggatctaaaattacgcaagaacagtgcctgctcattacccgtaaacaaggaaaggttggttatttgggaattgcgtacagcgatgttactctctctgaaaaagcctttgaaaatattttccgccgagagctcactctcaagggtttctggaattcgtattccgcgccgtttccaggaaaggagtggatgaacacgatcgagttcgtccaacagggcaaaattaagcttaaagaattggtgtcgcatcgctacaagctcgaagacacccagaaggcgtttaacatgatgatcaaccgagaagaagaatacaataaggtgatgatcatccccaacgaggaactggagtaa

SEQ ID NO: 117 - DNA, 1041 bp, synthetic construct
  source 1..1041: mol_type = other DNA
atgaaggcagcggtgcttcattcggtcggagacatccgctacgaaaacatcgagatcaagccttacggagacgatgaagtgaaaatcaaagttaaagccgccggtatctgtggatctgacccgccacgtgcactcaaaaagtggaaatatcccgtgccagccattttgggtcacgagttctcgggttatatcgttgaagtgggaaagaacgtgaagggttttaaagtgggagatcgtgtcgttgccgtccctctggaaccgtgtcaccaatgtgaatactgcaagaaaggccaattttcgctctgcgaaagctacgatatgttgggtgctacttcctttggcggttttgcagagtacgctaacgtgaaggcaacaaatgttttgaaaattgacgatatcgactatgaagaggcggccatgattgaacctctcgcagtcgcactgcatggtgtgcttaatatcaatccgcaactcggtgatactgttgctgttttgggagctggaacgatcggtcaactcacgattcaatggctcaaggtttcgggagtcgagaagattatcgcagtcgacatttcggacaaaaaaattagcgaagctatgtccttgggagcagatattggtattaatgctcttaaagagaatccggtcgaaaagatcatggaacttacaaacggtttcggcgtggatatctgcattgaatgcgccggctctaagatcactcaggaacaatgtctgttggtcacgaagaaaaaaggtaagattggatatcagggtatcggtcacgccggaattgagttgtctgaagttgctttcgagggtattttccgtaaagaattgaacatccaaggtttttggaatagctacagcgccccgttccccggacaggaatggttcaaaagcatcgagtatgttaagcagaaaaaaatcaagctcaaacagttgatcagccatcgcttcagccttgaagacacagcgaaagcttttgagatgattggtgaacgtaaggaggagtataacaagatcatgattgtccaggactaa

SEQ ID NO: 118 - DNA, 1047 bp, synthetic construct
  source 1..1047: mol_type = other DNA
atgaaagcagcagttttgcattccgagaatcacttcatttatcaggatatggagagcttcgagtgccagaatgacgaagtcaagatcaaggttatggctgccggcatctgcggaagcgatacgcataaaatggtttcgaaatggaaatatcccttgcctgcaattatgggacatgagttctccggttacgtcgtcgaaaagggtagcgatgtggcaaacgtcgagatcggcgaccgagtggttgccattccattcttgccctgtcacacttgtgagtattgcaagtccggtgtttattctttgtgtgaagatcacggtatgatcggttccaagagctacggtggcttcgcggagtatgtcaatctcaaggcaaccaacgtccttccaattggaaacatggattttgaggaggccgctatgatcgaaccgcttgcagtcgccctccacggcgttctccatattcagccgcgtctcggtgacgtggccgccgtttttggagtcggcaccattggcatgttggccatccaatggctgaagattgcgggagtgaaagaaattatcgctattgatatttcggatgagaagttggcggaagcgaaagccatgggatgcgaacgaacgattaatcccctccaagacaatctcatcgaaaaggtccacgagtataccaacggcttgggcgtggatgtcgccctcgagtgcgcgggatctaagattacacaggaacaatgtcttttgatcactcgcaaaaagggtgaaattggttacttgggaatcgcgtattctaatgtggttttgagcgaacaagcttttgagaacatctttcgtaaagagcttacgttgaagggtttttggaattgttatagcgctcccttccctggcgaggagtggacgaaatctatcgacttcattctgaagggccgcatcaagctgaaggagcttatcagccaccgctttcccctggaagaaacgcagaaggcattcgacctgatgattaatcgaaaagaaacctatggtaaggtgatgatcatccccaataaggaataa

SEQ ID NO: 119 - DNA, 1047 bp, synthetic construct
  source 1..1047: mol_type = other DNA
atgaaagcagcagtgctccattctgagaatcagatcgtgtttcaagaatttgagatcggcgaacttaagccagacgaagttaaggtcaaagtgatggcagcgggcatctgtggctcggatacccacaagatggtgtcgaagtggaagtatcccttgccagcaatcatgggtcatgagtttgccggctatattgtcgaaaagggaaaagatgtggtgcatgtggaagtcggtgatcgtgtggcaggcatcccttttgtgccttgtaatgactgtgagtactgttttcgcggtcagttttccctttgcgagaatcacggtatggtgggttctaagtctttcggagcctttgcggaatatgttaacattccagccaaaaacgtgctgccgattggagacatggattttgaggacgcggcgatgattgagccttcggccgttgccctccatggagtcttgaacattcacccccaaatcggtgatgttgtggcggtttttggagttggcaccattggaatccttgcactccagtggttgaaagttgccggtgttaaagaaattattgccattgacatctcggacaagaagctccaggatgccatcgccctcggatgtgagcgcacgattaatccattgaaagagaatttgctggaaaaaattcatgagtatacgaatggtcttggagtggacatcgccattgaatgtgcgggcagcaagattacacaagaacagtgtcttcttattacgcgcaagcagggcaaagtcggctatcttggcatcgcttactccgatattaatctgtcggaaaaagcatttgaaaacatcttccgccgcgaactcaaaattaatggtttctggaattcttattcggctccgttcccaggtaaagagtggacaaacaccgtggagtatgtgaagcaaggcaagattaagctgaaggagcttatttcccaccgattcggactggaagacacgcagcaagcatttaatatgattatcaaccgagaggaggaatataataaagttatgattgtcccaaacggcgagtaa

SEQ ID NO: 120 - DNA, 1026 bp, synthetic construct
  source 1..1026: mol_type = other DNA
atgattaatcaggtttaccagctggtggcgccgcgccagttcgacgtcacgtataataacgtggacatttacggcaaccacgttatcgtccgaccgctgtatctctcgatctgcgcggccgatcaacgatactataccggacgtcgtgatgagaatgtgctgcgaaaaaaattgccaatgtctctggtccatgaagccgttggtgaggttgtttttgatagcaagggagtgtttgagaagggcacaaaggttgttatggtcccaaatacgcctacggagcaacaccatattatcgccgagaactacctggcgtcttcgtatttccgctcgagcggttacgatggtttcatgcaggattatgttgttatggcgcatgaccgtattgtcccgctgcccaacgatattgacctgagcactatttcctatacagaattggtttcggttagctaccacgccattcaacgtttcgagcgtaagtccattccgctcaagaatagcttcggtatttggggagacggtaatttgggctacatcactgcaatccttcttcgcaagctctacccggaggcaaaaatttatgtcttcggaaaaacggattataaactttctcatttcagcttcgttgatgacatcttcacggtgaaccaaatccccgatgatttgaagattgaccacgccttcgagtgcgttggcggaaagggctcgcaagttgcgttgcagcaaatcgttgagcatatctcccctgaaggttctattgctctcttgggcgtgtccgaactccccgtcgaagttaacacccgactcgtgttggaaaagggcttgaccctgattggatcctctcgttccggttccaaggactttgagcaggttgtcgacctctatcgaaaatatcccgatattgtcgagaaactcgcacttttgaaaggccacgaaattaatgtttgtacacttcaggatatcgtgcaggcatttgaaatggacctctctacgtcttggggcaagacagttttgaagtggacgatctaa

SEQ ID NO: 121 - DNA, 1053 bp, synthetic construct
  source 1..1053: mol_type = other DNA
atgttgttgtttgaagttgttctcccaatgatcaaccaagtttatcaacttgtcgcaccccgccaatttgaggtgacgtacaataacgtggacatttacagcgactatgttattgtccgacctctttacatgagcatttgcgctgccgaccagcgatactacaccggatcgcgtgacgagaatgtcctttcccaaaaactgcctatgtctctcattcacgaaggagtgggtgaggttgttttcgattccaagggagtctttaataagggcactaaggtggttatggtccccaatacaccgaccgagaaagacgacgtgattgcagagaattatcttaaaagctcgtattttcgttcctccggccatgacggtttcatgcaggacttcgttctccttaatcacgatcgagctgtcccgctgccggacgacatcgatctctccatcatttcctacacagagttggtgacagtttctctccatgccatccgccgatttgaaaaaaaatccatcagcaataaaaacaccttcggcatttggggagacggaaatcttggttatattaccgcaattctcctgcgcaagctctacccagaatctaaaatttacgtgtttggtaaaactgattataaactgagccatttctccttcgtggacgacgttttcttcatcaataagattcctgaaggacttacctttgatcacgcctttgagtgcgtcggtggacgaggctctcaatccgcaattaaccaaatgattgactatatttcgcccgaaggtagcatcgccttgctcggtgtttccgagttcccggttgaggtcaatacgcgcctcgtcctcgagaagggactgaccttgatcggctcttctcgctctggttctaaagactttcaagacgtggttgacctctatattcaatacccggatattgtcgacaaattggcgctccttaaaggacaggagttcgaaattgccacaattaatgacctgacagaggcgtttgaggctgacctctccacctcctggggaaagacggttttgaagtggattatgtaa

SEQ ID NO: 122 - DNA, 1026 bp, synthetic construct
  source 1..1026: mol_type = other DNA
atgattaataccgtctaccaactggtggcacctcgacgattcgagattaagtattccgacattgatctcaacaataataaggttatcgtccgtcccacctacctctctatctgcaacgcagaccaacgatactaccaaggactccgcgatgccgaaattctgcgtaagaaacttccgatggcgttgatccatgaagccattggagaggtcgtgcgagatccatctggaaactttaaaaccggcgagttggtcgttatggtgccgaacacacctgttgaagaagatgacatcatcgctgagaattatttgcgatcctcgaaatttcgtgcatcgggttttgacggcttcatgcaagaatatgtggaaatcacaccggatcgcctcgttcgtcttccccagaatatcgaccgtactgttgcagcttttacggaaattgtttctgtcagcgtgcatgcaatcggtcgttttgacaagatcgcgcacaaacgacgaaacgttgtcggcatctggggagacggcaacctgggatatattactgcggttttttttaagactatgtttccagagacgaagctgtatatttttggagtcaacccagataaacttcaagattttacgtttgccgacgcgacgtttacggtggagcacattcctgaagacgttaagattgaccatgcttttgagtgcgtgggtggcgcaggctcgggcaaagccattaatcagattatcgactatatcaatcccgaaggtaccatttccattttgggcgtttctgaatacccagtgccaattaacacccgcatggtcctcgagaaaggactgcgcatctttggatcgagccgtagcggtgtcgccgattttgagaagaccgtcgcgctctacaaatccaatcctgagattatcaattatctttcgaatatcgtcggtgcagtcgtcccagtgcgaacgatcgaagatatgaaaaaggcgttcgaaatggacatccaaaaggcttttggtaagacgattatgatgtgggataaataa

SEQ ID NO: 123 - DNA, 1032 bp, synthetic construct
  source 1..1032: mol_type = other DNA
atgattaatcaagtctatcgtctcgtctctccacgccaattcgaggtcgcgtataacgatcgcagcctccagtatcacgaggactttgttgtggttcgacctacgcatctgagcatctgcgctgcggatcaacgatattacactggctcgcgtggaaaagaagctatggcaaaaaagcttcccatggctctgatccacgaggccattggtaaagtggtctacgaccccaagggtgagatcaaaaatggcactatggtggtcatgattccgaacacgcctactgaaaaggatgaagtcattggtgagaattatctccgatctagcaaattccgctcgtccggatatgatggattcatgcaagattacgtcttcatgggtcgcgaccgtattgtggaactcccggaaggaattgacccgtatgttgttgcttttaccgagttgatgaccatcacaacccatgtgttgagccgatttgaatctcgttcccataaacgacgtaacgtttttggcgtttggggagacggcaaccttggtttcatcacgacactcttcctgaagaagatgtataaagattgtaaagttatcatcttcggaaaaactggatataaactcgacaatttctctttcgttgatgaggtgtatacgattgacgaaatccctgaggacctgcgcatcgaccatgcctttgagtgcgttggaggtaagggttctcagtatgcaatcgaccaaatgattgaccatctccaccctgaaggttccattgctcttatgggtgttagcgaatttccagttgaagttaatactcgtatgatcctggaaaaaggaatcacactgatcggaagctctcgatccggtcgagaggacttcgtgcgcacggtcaactttctgaaggaaaatcccgatgttgttgaatacctgggtacccttgtgggcgaggtccaagaagtcaagacgatctccgatattttgtctgcatttgagaaagaccttacatcctcttggggtaaaaccgtcatggagtggaagatctaa

SEQ ID NO: 124 - DNA, 1026 bp, synthetic construct
  source 1..1026: mol_type = other DNA
atgctcaaccaagtgtatcgcctggtcgatccacgtcagattgaagttcaaactgttgcagaagagatcactgataatgacatcgtcgtccgccccaaatatctgtcggtctgtcatgcagacacgcgatactttacaggtcaacgtccccaagcaaccttgcgccagaagctcccaatggctttgatccatgaaggagttggcgaggttgttaaggaccctcaaaataaatttaagcccggtacgttggtcgctatggtccccaatacgccctttgaaaccgaccctatcattaaagaaaactacttgccaacgtctaaatttcgcagcagcggttacgatggtttcatgcaggaatacgttacacttcatcgtgatcgcgcgatcgtcgtgccagacaacttcgaccaccaaatgagcgcattcattgagatggtttccgtcggagtccacgccctcacccagctggaggccgtgatggatgcggatcgcaagatcatcggaatttggggagatggcaacttgggttttatcacagcaaccctcgtcaagcaaatctttccagactctcaactgatgatctttggacgacatcgctccaaattggactatttcagctttgcggacaagacatacctggtggacgacattcctagcgatcttcaagtttctcaggctctggaatgcaccggaggccgaggctcggagtctgctattgctcaaattatccaacacattcgaccaatgggcaccgctatccttatgggagtttccgaagatcccgttggtatcgatacacgcagcgtgttggcagagggattgacccttcgcggcgtgagccgtagcggtcgcgcggattttcagcgcgccatcgacattttgacgaaatcccccgtcacacgtgaacgtctgcaaaatcttgtgggtttcactcgaaaggtcagcacaatccaggatatcaccgatttcttcgagggtgcattgacaaactactggggcaaggccgttatggagtgggatgtttaa

SEQ ID NO: 125 - DNA, 1014 bp, synthetic construct
  source 1..1014: mol_type = other DNA
atgatcaattacgtgtatcagctggtcagcccccacgtcttttccctcaaatatgaagaagtggacttcaagaaagaggtcatcatccgtccgaagtgtatggctgtgtgccacgcagaccagcgatattttctgggacgccgcgacgctaagatcctgcgacaaaaattgcctatggcccttatccacgaatgttgcggtcaggtggtctgggatggcacaggttccttccaacgaggccaaaaggtcgttctcattccaaatgtgccaggacgcgacgacggtgtcacatacgaaaactacgctgaaggatctcgttttcttagctcgggctgcgacggtttcatgcgcgagtatgtcaacctttccccagatcgtgtggttcccttcgaacaggttccgcttccggtggccgcgatcacagagttcgtgtccgtggcggttcacgcggccggtcgctttatgcgagcggcgcacacacgccgcgaggctatcggagtgtggggagatggctctctggcttatgtcgtctgctgcgttcttcgtcgactgctcccggagtcgcgtatttttgtggtgggtaagcatgaacgcaagttgctccagttctcgtttgccgatcgcaccttcctttttgatagcctcccggaggacttccatattgaccacgcgttcgaatgcactggaggagagggctcttactatgctatcgatgatattattaccgcggtgcgtccccaaggcgctgttatgcttatgggtgtctctgaaaaccgcgttccagttcgcacccgtgacattctggaaaaaggcttgacgttcaccggttgttctcgttctggacgcgaagactttgttaaggcagtcgagcttatggagcaaccccaattccaaaaacgccttagcgcaattatttacgaggatcgtccggtccatactgtcgccgatctgtcccgtgttttcgagacggatttgaatacgccgttcaagacagttttccgttgggagatttaa

SEQ ID NO: 126 - DNA, 1017 bp, synthetic construct
  source 1..1017: mol_type = other DNA
atgattaacacggtgtatcgccttatcgccccaaagtccattcgagctgactttgtggatctgaaattggatgaagaacgcattatcatccgccctacatatttgtcgatctgtgcagcagatcaacgttattacaccggatcccgtggtcgcgtcgtgatgaagcaaaaacttccaatggcacttatccatgaggctgtcggagaggttgtttatgaccccaaaggtgagctcccagtgggaacgcacgttgtcatgattcctaatactcccaatgagaaagatgatattattaaagaaaattacctgcgtagctcccagttccgtgcgtccggatttgacggcttcatgcagaatgtcgtgtctatgcgtcgagatcttgtcatcccatttgattacgagccggaagtcggtgtgctgcttgaactcatgagcgtcggaatgaatgcggtgagcactttcaaaaaacatgcccatgaccgcaaagacgctattggaatctggggaaatggcaacgtgggctttgtcactgcactcattctgcgaaaagagtttcctgatgccaagatttatgtttttggtgtggaagagcataaaaatcgatacttttcttttgctgatgatacatttatcatcaatgatattcccgaggacttgcaattggaccacgcctttgagtgcgtcggaggccgaggctctgaagcggccatttctcagatcattgactacatcaaaccgcaaggaacaatcaatttgatgggcgtgagcgagaatccagttcccattaatacacgaatggtcctggagaaaggcctccaacttctcggaaattcccgaagcaactacgatgattttaaaaagtctgttgacatgatggcgaacaacaaagacgttcgtgaatacctttccactattgtctctgagatggttgtggtgaacacaattgatgatatgatccgcgctttcgaagatgatacttacaatgatttcaagaccgtcatgaagtgggaaatttaa

SEQ ID NO: 127 - DNA, 1026 bp, synthetic construct
  source 1..1026: mol_type = other DNA
atgcttaaccaagtttatcgactcgtttctccccgtcagttcgaggtggagacagtcgcagaagaagttgatgcggatgacttgatcgtgcgtcccaagtttctcagcatttgccacgcggacactcgatacttttttggacagcgctcgcaagccgcactccgagccaaacttccgatggctttgattcacgaggccgtcggtgaagtcgtttacgatccccgtaatgaatacaagcccggaaccttggtcgcaatggtgcctaacaccccggtcaagaaggatagcatcattcaagaaaattacctgcccagctcccgtttccgatctagcggttatgatggcttcatgcaagaatacgtgtgtctgcgacgtgatcgagctattactgttccttccgactttgacccgcatatggcggcgttcattgagatggtttccgttggagtgcaggcacttactaagttggaatccacaatggatgaggatcaacgcgttattggcatttggggtgacggaaatctcggttacatcaccgccaccctcgttaagcaaatctttccagactctcagctcctcgtcttcggacgccatcagtctaaactggattatttctcgtttgcagataagacgtatctggtggacgatatcccggccgacgtcaaagtttcgcaggccctcgaatgtacgggcggtcagggctccgaagccgcgatccaacagatcatccaacacattcaaccgatgggtacggcaattctcatgggtgtttctgagaatcccgtcggaatcgacactcgttcggttcttgctgaaggtctgactctccgaggagtgtcccgtagctcgcgcgaggattttaagcgtgcggttgacatcctgtcctcttcgccagttacgcgtgaacgattgcagaatctcgtcggctatgttcagaaggttagctccatccaagacattaccaacttctttgatagcgccctcactaattactggggcaaggaggtgatggagtgggacgtgtaa

SEQ ID NO: 128 - DNA, 1029 bp, synthetic construct
  source 1..1029: mol_type = other DNA
atgattaatacactgtacaaacttacggccccactgattgtggaatccttttatgaaaatatcgactgtcattccgacaatattattgtgcgccccgaaaaactttctatctgcaaggctgacatccgatactacttcggaatgcgtaatgctaaagtgcttaaagagaagttgcccctcgcactcattcatgaggcatgtggctctgttgtctatgacatcaccggcaagtttaaggctggtgaccaggtcgttatgcttcctaatattccgggtattaacatgcagtatcatgagaattatcgtcgtgatagccttttccgcagctctggagcagacggattcatgcaggagttggtgtcgatccctcagtcgcaagtcatcaaatttgagaagatggatcaaaacattgccgcgttcacggagttcatctctgtcgctattcatgcagtcagctcgtatcttgatcgcagcgcgggaaagcgaaatggtatcaagcgtaaaatcggtgtgtggggtagcggcgcaatgggctacgcggtgtcgtgtgtcttgaagtacttcattccatctgcagagatcactgtcattggaggtagcaaagcaaagctggacatgttttcctttgtcaatcatacttgttccctgagcgagcttcctgacgatgcagagttcgatgattgcttcgaatgtgtcggtggagcccaatctggcaatgcaatcaatcaaattatcgatcatattctgccggaaggcctcctgctgttgttgggcgttagcgaagaggccgtgcctgtcaacactcgaatggtgctcgaaaaaggcatcactttgttgggtcgatcgcgctctgagcgttcggactttatcaaaacaatcgacatccttgatacgaacgagaatattcgacgccgcatttctaacttgatctctggcgaggtggagattaacgaggtgaacgacatccacaaggcttttaatcagtccaaaattgcagactataaaatcatcttgaattggcgtatttaa

SEQ ID NO: 129 - skipped

SEQ ID NO: 130 - DNA, 1002 bp, Moniliella pollinis
  source 1..1002: mol_type = other DNA
aacacgtagaacacagggatcgccatttgtccgaaatgcaatctttgctctcgaagcttgaagcttgaatagcttgaagcatgagtgcatgaggggctgctatgatcttccaaccaaacttgcttgggcattgcactttggctggatagctatcatttagctgacccccaaagagactgccaatgatatgatatttgtgtaggtgcacgagtggatgagtggcgcgactacctgtcacaagatagatgctcgatgcacttcatgtgaagtggctagtggatgtccggagactggagtacagtaaagagtttggagttgggaacagcgcgaatgaaagaggctcagagagaggtaggtttgatgtgacgtcaagcgggctagtcagttagcaagggagtatggaatgcagcgcgcaacgcgcagcgcggagcccagtgcgcctgcgctcaggtactcatactcagtactcagtactcaggcgccatgccggagcttacatgcaatcaattaaccctgacgtctggcgcggcctgacgcctgaggcctgaggcctgacgcggccaagctccaagcgcaaccccaggctggcttgcgctggcgggcgcgagacgcagcagggggcaagtgtcgcagagtcgccgatcggatctgtggaacagcacaggaggcccgtgcggtcggctgcgcagtgcggtggagaagctggaagctggaagctggaaggtggaacctggaacttggaacttggaaaggaagaagagcgggaaggcgatgcacgatgcacgatgcacgatggggttggattgcgtacgagtagccgcacagcgcacagcgcacaacactcaccccatgcccccacgccccagcccgtgctcgggccatgagctgctggcaaccccccgaggcagccggcctttaactcaagtagcattcgccgccggtcggttcttcttagcctcccaccaccaccacttgcccgtgcttggacgctaattacaataa

SEQ ID NO: 131 - DNA, 679 bp, synthetic construct
  source 1..679: mol_type = other DNA
agctcagaccttgcatgttagccttgaccttgcctctatgaccactaattcgcacaagattgcacgttaccattgtcatcttgccatgtatccaatgtttcctgtttgccatagtacgtagtagatacatcgatcatcgatgcagatgacgcagatggcattggttcgctttgccctatgcatccatcatgcatcatgcatcatgcatcatgcgtcactatccatattaatcattgccctctgtactaggccatgacacctgcagacccttccccagggatgcttcttgtaatagccaatatactacacaactttaccgattacgatcgagatcgatctcactatagtttgtcgaacttcgatgcacatcgagggtgcggaaaaaagctgacggaagcggaagtgggtgaattggttaatttagttagattggcagggttgttcccaagattcaacgcaagctgagaaagaaaacagaaacacgaggcataaggccagtcagaaaatgcattacgaggggagttgaagtgactgtgggccagtgcctgggtcgtcatgtgcaaattttttcttcggttagactgccgcagcatgcagcaactctgccggccctatataactagtgcttcatcttcttgtcattcttgtctctttaccaacacaccggtactctttcacc

SEQ ID NO: 132 - DNA, 1002 bp, Moniliella pollinis
  source 1..1002: mol_type = other DNA
catcgttccagcttgccttgggtgctagccagcgcaaaagtccgacgaacagacgaattgaccgtagtcgatgacagtcgatgacagtcgatgacagtcgatgacagccgacgaccgacgaacaacaaccaaccgcacgcagcatgaggccgagaggctcaggctgagccgctaaggcgctgaagcttgaagctcggtggtccagtcagatctcatgatctcacaccgccgcgctgctgcggtcgtatggttcaatttgctgtgcctagcctagcctgggtacgtcggtaactagccactagccactggccattatttggctactgggcacactaggaggcgcactagtccatcgcaagcggtaacttacctaccggccactacctgatgatttccctcttgcctggcggcctggcggcctggcggcgcactctttgcgctcggacccgcaaattgcaaaccaacaaacgactagtgtccggtacgtgtgcccaagtaacctgggcagacatagaaccacattgatcgtagggaaccgcaatggaccagtacgctattctcagtacattctgtacacttttgcctagattggaatctggtgaggatcaagatcaaatttcaaaccaactccacggcactggttcccgacacttggactgtagtactgaggtactgaggtactgaggtactgaggctcaactgagtctcaactgaccgtgaccgcgcttgtgtggtggcgtggattctagtgttggatgtgcgcagtggtgtgtgcggtggtgcgttcagattcgtcggtagaacttgactattcacgtcttgtgctgcgctgacgcttggaacctggaatgttaaaccttgggtcctgagggtctccaccccccaagtcgactgggttctatataaagtcgggtaggcaattggctagggagaatctctcttttctctttccccagaacacctgttcactcacttctcacctctttacttacctacttcaca

SEQ ID NO: 133 - DNA, 1000 bp, Moniliella pollinis
  source 1..1000: mol_type = other DNA
cctcgttcttgattgctttcaaaagtaatttaaggagagaacctggtcgtttgttgctctactgaatgatcttacctataccagcatacgacaccttgctgcccctccccttcaccaccaccatcaccactttcctctttttctttgggtttttctagtcgttgcatttatggttgattcgctctttgagaaccgtatggctgttattccttcccaactcttttgtctgttttatcgttgcatccaaacgtttgggctcttcgtacctcttttttctctgtttgccttttatttttggtttttctatccgtttgatggttgtgactcttgttttcctttgggaaggtttgagctcaacttctcttcggtccttgttggagtttgacttccttttctttttcagctgtggccgatcattacgatcaataatttgtgaatatgatatcgactacatcctgaatcttttagcgaaccatagcagtttagcgtcatagatatgcatgcatgatgtacatcttacacgcaccacggatgatgctcagcgctcagccacgcagccgctcagccgctcgctcggtacgctcggtcatgatgtgcatgatgcaagcctaatgattgacgggtacttgatctgtgtcccaattcgatcgagatcgatctcactatagtttgtcgaacttcgatgcacatcgagggtgcggaaaaaagctgacggcagcggaagtgggtgaattggttaatttagttagattggcagggttgttcccaagattcaacgcaagctgagaaagaaaacagaaacacgaggcataaggccagtcagaaaatgcattacgaggggagttgaagtgactgtgggccagtgcctgggtcgtcatgtgcaaattttttcttcggttagactgccgcagcatgcagcaaccctgccggccctatataactagtgcttcatcttcttgtcattcttgtctctttaccaacacaccggtactctttcacc

SEQ ID NO: 134 - DNA, 1007 bp, Moniliella pollinis
  source 1..1007: mol_type = other DNA
cttgacgggttcaatattcaatactcagtgttcaagcagtggtaggttgctccgtggatggaacgacgggtttaatttcttccgccatgcaccatggtccatgatcggttcagatggacagttggtatgagaaagtggtaacagataaatagaatttcgtacaagttggcaagagcctggccgatggtccatggctcgatggctcgatggctcgatggctcgatggccacacaccatgtcatctactttctgtgcttctatgcggacgagtcggaacagctgtcaaactgcgtttggggtatttgagcggaatttgaaaccttgttgaaactacattgtctcctcgttacttctctggcatctgtttgatcgaacggcgtcatgcaatagacacgcgatgaggcccaacgacggtgacgttgaacgcctggcccacctgctacaacaccgtagaacgtgttgaagttgaacgtcggacgttggacgttgagttgacgcgtgatgctggaaccgtggatgtagcagcgacagacaagccctctaagcaatctagtcgattttcaaaccaactaaacgagccttagttcggacaaccctagtccagtgcgggggcagcgtggggtcagttgccagcgaaggtcaccccagctagctgggttggctagcttgactggctcagaagtatcgatgctggagcttcaggccagtacgaaaatacactgtcgtagtgctccttccggagttctgggcttctgagcccggcggttgtgcatcggtgcacagtgcacggaccggcgggtgggacaacaaactgtctgggcgtgaaatcgtgcgagtgttgatgcaaaccggacgtacccagcacgcagttcccagtactcagacatactcagtacctcagtggttgagcctcagcatcgcctccgtatttctacaaagctgttgagtcgccttttgactttttactaccaccatcccctcttcttctaaaccccttacattccaaa

SEQ ID NO: 135 - DNA, 1000 bp, Moniliella pollinis
  source 1..1000: mol_type = other DNA
tcgacgacagtgagtatagtcaactatgctatctagtagccaaagtaagtctacattccgggctttgcaggggttagctatttcattagacaatacttacaaccttcgaagggcttccccagaattcaattctatattgattcaatatccacccatcggacccgctctccgtaccccctgttcgcttcgccactacaaccatgtcaagacctgagaatcgtagcaaattgccccactacggcccgagtgctgtcggctggttaaagtagaatgacttgggtagccagatcgagacgcctgacattgatacgcagacagcgcagtcagtttcaaactgacaactgacgcgtactggattgacaggactccttggccggtgccattcgaatcgcttgtagacctcttgccagcatcttgccagagaagcttgaaggctggatcgctcagcctgagctcacacttagtagctccactagtcactcaggtgctcagcctctcctcagcgcctcaagctcaagcctcagggcctcagctgcatcgagctctggtgccagtgccagtgccagtgccagtgccagtgccagtgccagtgccagtgaagagagtggtatgagccaagctatacccaaaagcaaatgatggttattgccagcttccatgcacccctggggcgaaggacaacgaacaacagacagagtttgaattattcactggcctagtactaccaatttaaatttggtggttcagcgcaggaacggcgcgagtgagcgtaagggcaaactccgcatggggcgtgacgtcagtgtccctctggctgaggcactccagcaggctctggtcaacgcatcaacgtgtgtgtgtgtctaccaagcacattgtgcgctcgctgtccgtgcgccgaaatcgcaccagtcagaacgtctataaaacccctcttgcttggagggttaccgggccgtcttttcccaacgctccggctcactcactactctacacaaca

SEQ ID NO: 136 - DNA, 997 bp, Moniliella pollinis
  source 1..997: mol_type = other DNA
tcggaccccaagctctctagcttcaagctttcaagctagcttccagccagggtcatggaaccgtaggagctgggaaacgtgacgttgtcgctatgcctatcccatataagaattaacgtcgaatcatgaggcgcatgggaggctgcattggtggtatgatacataacgttatgattctatatgagcgatggagcgcggccgtctgccgctagtgtggaagttcgatacgcccagtccatttcgttcagatgacgtttggtccagaagtacggtacataccgagcgcaaacgtcgaacttatggccttggtcgctcgtggtccggcgtcgtcgacactttcatcaacggacgaaaggtagagccgaacgccagcggccaatggcgatggcgatagtagaatgaatagtcgtcagatctaggtcttaggctacaggccaccctgcctgaggcctgggggtcttacagcgagtctaaaaaacgaaaagccaacgtgccaacttgggcctgcccatgcaccctgccagagagccccaagctggtctgatgcaagcggagcaaaatgttggaagaatagtttcaacgatggtttggttccagtacgcacagtcgagagatgaggtactgcgcaacgagttgttggcgacggaaccgaagatggattgaactatttgatctacaggtgatggcgtggagtcgggcgtggggccgctgtgtgatatgtagaagtggcgctattcgagggctgcgcccgtctggatggatgcagaatgaagcttgcaggccgcagctggcaggatgggcgcagaacccggtgaaacatagttaaagcgcggggccagtgtcatatttcgcttgagccattctactcgttggcagcccaggcgccgctaatttacgccaactcttggtactcgagagctcgggcaatgtggtatataagcttgaggttccctacagcaaagcctggcttcttcaccacaaccgcactctagcaaac

SEQ ID NO: 137 - DNA, 1002 bp, Moniliella pollinis
  source 1..1002: mol_type = other DNA
gagcgtagagagctccatcgatggcctggttacaagttgcctgaagaccaccaatacggcccgcacgccaacggcaggccaagaaaggataattgacaaccgtgaatctgaaagcttcggcgctcaggagctcatgtgttttgttgtagatataaaggtttctgaataccagttgggtattgacacggggagttggactgaatctctcagatctcccagatctcaagtactgagtcccaagcgtgccataattaactctaggttgcgcgggacacgccacctgagatcagggtgtacgcgcatactaatccattccaccaccaaagcaagactgagggtaccgcctgaggttctggctattccaacagtcacaagtcaccgcgattgccgtcaaattccaaagcgtagtaggcgctcgacggagggatgatggccagtacccaatttcgagcactcagttagatctgttcgtgtttagttgctcctgcagatctatcttaaatgtatactgtgccaggtaggatctctcggcacctatagatgatataaaagatatgatgatatgccaagtgccaagccgtcaaactgacaaaatgaaagaaacagcaggcaagctaggcaagcgtctatcgggggattaaacggatgagtcagcagcacaggagcagtcagtcgacaattccggctttttcccgcccgcaaggccccagaccccagaccccagccgccaccatgtccgtatccgccggggttagcatgaccacggcagatttctccgctcagcttgctcggacgactatatataaagaatcctttcctcgcagtccgtccgagcccttcctccaccccatcggttaccaccaacgacatcacttggtcttgacgccgcgctgcgttttcccgcttccgcgtctccctagtgatttagctggtgttttcctctacccgccactctactgtttcatcgcttgttgccaagttttctcagttcattctcatcaa

SEQ ID NO: 138 - DNA, 1002 bp, Moniliella pollinis
  source 1..1002: mol_type = other DNA
tggacgtggacaagcaccctgaagtcgctcagggcttccagatcaaggctttgcctaccgtctacggcttgtatgagggcaagcctgttcgtcagtgtaagttttaaaatatattgttcttgtctgttcgggttttacatcagtggtgtactgacacggctttttgttttattgctgcagtccaaggtgtacttcctgaggatatcctgcgccaatttgtccaagatcttcccagcttggccgcccaagatgcccagaacccgcctgctgaaagtagcgaggctgccaactaagtatagtccatcctatgagctgtcctaccccaaacaactttttcacgcccaacgtccaaacgtcacttcttattgcggcaaagaacagctgcttccccactcattcattacccctttctgatccacgaggtgtacccatggcctttgtacattccatgaaacaggtatccttttccccaccattacatctgaacttacaaagactttgcttcctcttgtacacagctcgtcgtccatcgtccatcatcgatgacgatcatcctgcattcggtatcatgcaccatcatgcagcgatggcaacgagggccatgcaccatgctgcatatactatgtgtatagccaatagccaatcttcaatctccaacttcctacagacacagcctgtggggaatcgcttaatcgctgtccatgcgtccatgctccgcgttcctcgcgctcgtcgcggcctcgcgacgattaagtcacagtcacgcccacacagcgcgcgagcgcacgagccaccatcatcacgtgatgagacaaagagtccacttccgtaaaagcaatcttaataatacatgtaaccctagcaatgtagccctaataatttgtttggcctttattttattgcgcccccgcagcttttgcaccccggagagtaaaagtattccggttgctcgtcagagcatccctttctttctccatcagcaaagcgtgcgaccgccaagaa

SEQ ID NO: 139 - DNA, 921 bp, synthetic construct
  source 1..921: mol_type = other DNA
tttggatgaggcattcaatgtctccatgtttgaagaccagagaaagtgtaggtaacacaatagccatggacaattagcgaatccgaatatgtgtactaacattgtgcctccaactgacagctggtcgaataatgattgaaatcatcaaacatatcagagatatatcccagaaccatttaacaactgttattgtatgtatgcattactgttttacattgtgtctttccaaatactaacattgccattatccaatccatacatatatatatatatagattacacaacgcaaacctcgacagtcgattggtttacatcgtgtaagcagccttttacggaatatgatggacaaccagatcctcatagatggagacaatgtgcagatagattccatttatgatgacattgatgtgtttttaaatgcaaaataatctcctatataagtgagttccgagtctccccatgcttatcttatcgtgttttttctgtaaattaggtcaaagtattcaaacaattccctcaatctttcccattttttgctgagcccccatatcatcaaattaacgtatcaaatttcctaattagtagccccgtatgttaaattagacatgtgtgactgccatcccggacagcctacccaatgacacccgcgcaccgcacatattgtgtttagtgcgcgccgtctgctgaagcgactccctgtttgggaggaaccgagggcgggttgcccgatcccttgcccctcgctcctcctcctgggctcccccttgcagagggacaccgaggggatccctcgtgtgagagcttggaggtggatggtggtcaattttctcatttgattgaaagatttgttatattgaaaattcagtttgtggaagttgtgattaaaaggttttactgtttgttctgtagacacattcaata

SEQ ID NO: 140 - DNA, 500 bp, Moniliella pollinis
  source 1..500: mol_type = other DNA
acggatcaacaaaaatgtgcgccagctttgttgtgtgcccttttcctctagcggatcctatccacatttcgtgaatgaaccgattaagctctgacgagatttccttgttttctgtagatacctcttgtagaggtgtcaaagttatgttgtgatcgagagagttacctgcaaggtattatgcaagcggcttgatgaggacactcaactacgtgtgagtaggagtgcgttgctcagcagttgacgcgtgagccgcttgagcagcttgataaaggtcctaatcgtcttccagctgttggcagacgacaatgtgctgtagtagtaggataggcccgtaaaagtgtagaagcaataggttgagactgactgtaatgggtacttgcgttcaaagactgaaagtccaaaggattgctcaaaggcccctgaggtctgagcctctgagcgcgctcttcgtcaaaattcgccggggccatcggtcatcctctcgagggcagcatcttcct

SEQ ID NO: 141 - DNA, 500 bp, Moniliella pollinis
  source 1..500: mol_type = other DNA
gtactaaccaagtctattgtaaagctggtgtctgctgctgcttcagcaagtgccattgctaccatcgcaagcaaattgcaaaaaaattcgttcaatggtctaatttaagtaaaatactcataatttataaaatgccgcttgtccttaccttttgtctttctccttattatagtagctgtagttatcgtagtcctcaggacttcgtcaacgctcgttgatgatcatatatacttcacctcattcattcataaagcattcattaggattgtatgatccggcagtgcatcatgcatcatgcatcatgcatcaggacatcatgcatcatgccgtatcggtcgatcattgcatttgattggataatacgatcgtgtttaggcattggcagtcgaaacgaggataaagaagaggtcagtaccagtgcacagcacgcgctcgcgctctatgcgcactttgacgcttgaaaaaaacttttcagccaatcggatatagacagcggaccc

SEQ ID NO: 142 - DNA, 493 bp, Moniliella pollinis
  source 1..493: mol_type = other DNA
atggtctgagccgcccacgattccttccttcatgagcgtatgacgacccttttacttagcatgtgcctctaaagaatacgttttgcatacccacatattcgtaaccctgtcctctatagcttctacaggtcatagtcactggctgccagtataaacgtgtcaatatctaatcctcataagatgcctcgctctgtcgtccacaataaaattcagtaacgcaaggactgcgcgactgagtgattgccgatgatatgagaaaactaatttcaagccatttgaacttcaataaatgcttccgctaacatcacggatcatcgatcatcaaccagcctccattaataggcctgccaccactcgcgcaatcatgaatctgatcatacctggctagcgattctcataacaccagaattacctgcccattaaagaaaccctattctgcctgtaacccggcaccagccggtccgaattcacgacagactaaggctctcgcgca

SEQ ID NO: 143 - DNA, 500 bp, Moniliella pollinis
  source 1..500: mol_type = other DNA
atcagttggaatcatcaaccttttttttttgtatcgatttcttcctaccctcacctcccttttcccccttaactcctcgctttgaacctccttacccgagtgcctacctttacctttttctttttctctctcccctgcctaatattctaggcttgctactatactgctctctctaacacgatttttgcgcttgtaagcatttttctctttttaaatctaggttttatcatttgttgcatttatccaagtttttttttttttttgtttgtagtggttttactgtttttgtgttttgtagcttgactaggttcttattctattgtagatgtatatgatcggatgcattcccgatctaaaaggaaaatgttctcgactgatatttatttttaccttattgtcttcctaaatggtttgactcttgccttcttccttgggacgctttgcaacgttttgtacgtacgtaagggttcatcgtttggataagcgacacagttgtcaag

SEQ ID NO: 144 - DNA, 324 bp, Moniliella pollinis
  source 1..324: mol_type = other DNA
attcaccctggagtaactgcgcttcatcgtttctttgttacgacaataataccacgctgcatgctttgaattgagtatatattttgatgactggttcaaatagatctttcctccatagccttcgagtactcgtgatctcagcattatcagatttgtgtccaggcccccgaggacgatgcggttttcctggagtcactagttgggaagatttgtactggttgggtgtaggtagagagaaccattgattttggtgtagctgttcgttttataaggccgagattacgtaatgcacatgctgccctagcaaatcgcgtcgcgtcacgc

SEQ ID NO: 145 - DNA, 496 bp, Moniliella pollinis
  source 1..496: mol_type = other DNA
atgtgcttagattaacatacacttgacttccttacgcgttgatatatacttggatctccataacttctattgtatagtttaatcaatggactccatgttgacatcccattatgcgatctatagtagctggaaatagcaaaattgaagttcggcagacgactgcaccaggaggggtagattctgtcccataactccctaccacaggccgtgctctggttcgatttaccttagcctgatgcgctcaatgtaacgcgtaattctgagtggggttcggtcgtccaaggtttcagtatgcgctgtgcagatagtactgtatcgtgaaactcgaccgttgcacatgcactttatcaagtgtcgtaggcccagagtcgtaggccaagagtcgtaggccaagatggaaggcctgaagaaaaagaaagctttgatcgttctgatctatgcaatggattcatgagctaagtattagctatacaaatgattcgagcatagcagaagg

SEQ ID NO: 146 - DNA, 500 bp, Moniliella pollinis
  source 1..500: mol_type = other DNA
gttgctccctttgctgttctatgatccaaaagatgcttagtgctccactctctactcccgactaccttttacgcattctgacatgactagtagtgcaatgttacccctggtgttttctcgcaatcactttctgtctgctatagcttttgatcgtcagtagttttttggtatagctaaagtagacttttgtacctggcgttcaatgtaattttactccttttttgtgcgatgcaacagatggtgtaaagatcgtcgttaaagttttggcttgatgcttgattcggtgacggttgcttgggtgatccttatatcgtctcctggtgttctcataagcccaggctcttcttagctatgtacaacaggtccaccactgactatgttatgtagaggcatgcatttaacttacggaaagatttaatggagaagaacgtacctagtcagatgcttgacatgaaaacgtattcctgcaattcacaaatcagtatcctgcctgtccactc

SEQ ID NO: 147 - DNA, 500 bp, Moniliella pollinis
  source 1..500: mol_type = other DNA
gcggttcgcacttttatcccaggcatgaaaaatgacgcacggctgtcgcacgctacacccagtagtcgccttttcaggcagtctatgaggggagcttttcattgcccaaaattactagcctgcaattcatgatatcaggttcactttctcccgatgtctatagatttctcatagcgctttgaaaagacaatttagctactcagtttataagcaaatgatgtggaggtatttattaggtacaagatacgataacgtttacacgcggggaagcaagtggcaaatcgtcgacaacaccgcatggtggtggtggaatcgtactccatcaaagcttgcttgtcactttgggaggcaccaggttgaggccatcgcccgaaggtggttgtggccagggtttcgatatttcatgaatcaacgtgttgatggtattggattgggtaagaggtcgatccggctgttggtcagagtgctcatcacattcgtcgttgtcaagcccgagttgc

SEQ ID NO: 148 - DNA, 500 bp, Moniliella pollinis
  source 1..500: mol_type = other DNA
gtggcgttgattcgtatcttattattgatctgtcctgttccccacgttgccaagtgattgttcatgctatcctctctccattctgtttgtgttgcacagtcggtagttgtacgtagtagctcgtcacaaaatatgaagtgagccttgcaatgtaggcattcacaagctgctaggcaggctatgatctaagctaagtggcaaaaattctcttgattcaatgccaaactatactattgttcctcaggcaaaagcagctatataagttgcattcaacgcaaccgccatacaagcaaattagagagaaacgggatataaggtgctttatccctgaaggagtagccagcgtctacttggttgctacacaatacagcaaacagtgtacttaatgagccattggctgaactggagctcgcagaggttcgagaagggcgggtcataccagctgccctccatggaagctggggtgtcgatgatgaaaagtgtcggaacgtacgctagta

SEQ ID NO: 149 - DNA, 500 bp, Moniliella pollinis
  source 1..500: mol_type = other DNA
acgaagggtttcccatctgtgtgacctgatccctttttacgtttttttgttttgttttttcttttgttcatgatcaacttgggagtgattcctcttggtgatgtcgaaaattgaactgttataccaatattctgttgcctttgtttcctgtttgtagtttactactttttacagtagtcgttgttcctgccttgcttgcgtttgtcagggtttccctttagcttagtaccaatatctagccttaattttgcttattctttctcaccgcccatgattgatttcaatcatgattaatgatttatgcatgaaaactcaaaatactcaattgtcttgtacaaggcaatcacaagctggtcagccattctcagcgcctataagagctttcagccaggccggccccaaaacgatctaccctgtggacctggctaggctaaactttggaaagtcatgcaattatgaacgtttgaagctcaagcgctcctaccctctcctggagcagt

SEQ ID NO: 150 - DNA, 500 bp, Moniliella pollinis
  source 1..500: mol_type = other DNA
tggtgttcaccactgttgcttcccctttgttggagcgtccgtcgttctgatggcgctctgagcccaaaatatcccttcttcgcccgagagcaagcctcggagtgtgcttgcaatctacttttcctactaaagttatcttcttgtggcttctgaatttgaatagaacgtgttcagacttgttagctaaatttgttgatgcgagatacttgacagaatcccgttgatgaactcatctgtgtgaccaccgcctggtgatggaatctcgcgcggaagccgtggtgttactgactctcaagcaattcagtagataaatttgtataacatcattgcaaggggtgctagcaatcaattgtccaataccaaacggcggcaagtgcaaaggggcgatagagagtttctgcgaggaagggaaggaatccgtatgcctgaaaacttttgtacaagtgtctttgtaagggcgaggtctgctctgacatctctctgagatctgagatctgata

SEQ ID NO: 151 - DNA, 500 bp, Moniliella pollinis
  source 1..500: mol_type = other DNA
gtttcttggctgttgacgaaatcttatgaaatgcacgggtctaatatttcctgccaattgtgtacccatctcgtttgtgaatgtcatagctagctctgtagtttctaaacgaccgtcttaggccggggtttgctgattggggattaaggataggatacttggccagtttgggccgatcaatatcaatctgctaggcgttccttaggtcaacttgaattatgatatatgaggtatgaggaaagtgggctaaatctgtggattaggatcagaaaaaacgtggcagaccctcgatctaggcctacgtcagcaatttcagcaatttcagcgccttgccccttagataggtttcagccgctcagcgcgcgcaatttcagcatggatgagatcaaaccaaggggcagcagttggcgaccctgtagttccaatcgcatgcttagtgcataacgcgcacatcaacgtgtcagattctcagagatctcaacaagcccactagaccctag

SEQ ID NO: 152 - DNA, 504 bp, Moniliella pollinis
  source 1..504: mol_type = genomic DNA
aatcgcctgtgtagcgaacggggccagctgggtaaggccagcggccggtagctaggactatgaggctaccaggctgctgggtaactaggcagctaggcacctaggcaactgagcaactgagcaactgggcaactgagcggtataggtttggcttgggcacagttgatattgatatcaaccagtcgctcgttcggttcaccagaacccagtgtgtggtagcgagcgtagaatagccaaaaggttttgagctgaggcgctgaggcgccacgggaggacatcaccgcctgagcacacaggatttcaaactgtcagacgggcgtggtgccagtgttggaagtgggcgaagcacctcgcatctaagacatgtaattaaactctcgacagccatcgtccattgacaccaacgtgcaccaacacacgcgagagctgcttcgttgtgcctgtcgacgacattgcctcgttccccagccaagtcgccccaccgctacaccaagcgcactcgca

SEQ ID NO: 153 - DNA, 499 bp, Moniliella pollinis
  source 1..499: mol_type = genomic DNA
catccgaaattggtggtttgacaaatgcaccttcttctccaggggctcgtgcaaacgcagtagccgagaagaggcgtaccggagaggaagacccaacaaccactgatcggtttgaagttggatgagaaagttgtgccaatcgcggagccgtagcaacgctacgagcgctacctacaacgactccacgcgcaatcggtacgcgcaaaggaacggatgagcgaccgagcaggttgcgcgaagccatgacgattgctctacccccaacgagctggatcaagttgggcagaacataatttatctcgcttccccgcgccacaagtagctccaccattcttctcaaaatagcccgattccgctttcgcggggcaaaacttccgcctataccgatccgattgaaacgccaaaaaaattaagttgtagtacgcctgttggtcgagcccgactggagcaccatttgagacactaggagataatttattcttttccttcttggccccca

SEQ ID NO: 154 - DNA, 300 bp, Moniliella pollinis
  source 1..300: mol_type = other DNA
cgggtaagaccaagtcggttggtgtttcgaacttcagcactcgtctggtcgacttggttgaggaagcttcgggcgaacgtcctgcggtaaaccagatcgaagctcaccccttgttgcaacaagacgagttggttgctcaccataagagcaagaacattgtcatcactgcttacagtcccttgggcaacaatgtcgctggtaaaccacctctgactgagaaccccggtattgtggatgctgctaagcgtttgaaccatactcctgctgctgtgctcattgcttggggtattcaacgcgggt

SEQ ID NO: 155 - DNA, 453 bp, Moniliella pollinis
  source 1..453: mol_type = genomic DNA
gcgaggagtagttactaggtagcggtatagcaattccgcccataatgcataaccgttctccctaccaaaacaaaacaatggctacgtggccggcgtgcgtggccgacatggtgcgggtgcggggggcggggtacgagtgtggggagttcactagttcgctggctagctgactagctgaccggcgtgtggttgtggcagtacgcagtgggaaagattaaatatgaaatattgaatatcaaaatgacgtttggggtggcacgtgcgcgcgccaacaacaacaagagcagccaccaagccaaagcaccaagcaccaaccccgcacaccattttgttacacccgcggcagaaatggcgtcagccagcagtcactattactcaatattcaataggggttccacttgactcacttcctcatgtatatatatatccatctaatcttcccaatacataacc

SEQ ID NO: 156 - DNA, 500 bp, Moniliella pollinis
  source 1..500: mol_type = genomic DNA
gcggcctatgcagacgcttggagcttgggcacattggatattggatattggctggctgccgttcgagatcccgttgctgtcgccaccgccaccggtcacgtggtcacttggtcacgtggaccacctgcactgcgcttagctacaagagtgcatgatgcatgatgtcatgcatgatatgcatgatacaagcatgaatattgatttcaatattgaacatttagtattgatatctcgatatgcgtaacacgtgacacgcaccatatcaatcagccgcaccggcactaaatgtttcaatttcaacatcccacacgctcgaatgctccctcgagctaatcggatttcggagctccgacatggccggcctcgagcggagtttgaaactccgttccgcccgaccccgctggtcgccgcgatgaaatcccgagtcaagtcatagcaagccaagtggctggctgactcaaaagctaataaaagtcgtagcaagtaatactccgcacgct

SEQ ID NO: 157 - DNA, 500 bp, Moniliella pollinis
  source 1..500: mol_type = genomic DNA
tcgcgtcttcaaaccgtggcgcgcgacacgtgccgcgaccaaaatttgttggtgtatgggaatagggttttctaaaattctgttgaggatgtgagtatcactggcatggcaccagtgtactgctcatcgataatcataaacgtatcaacccttcggctctgcgatctgtatctgctactggagggcacagcaagccttctgcttggttgcgctctgcgctctctgtggtgctttgccgctcgcggccaaggtccgcagcgggcattcaccaccatacgggttaagccaccagacgagtgctgctcgccgggccagctcggcgcctgtcacgcccccacattggcttgatgctcggctccttctttcatcttggaaccggcgggcaatggcgcttatcaccactcctgggccgggccccgcgtatactctcataactagtgcacgctttcaaataaatacctcgcctcctggctggccgaccgacgtttacccatccgccc

SEQ ID NO: 158 - DNA, 499 bp, Moniliella pollinis
  source 1..499: mol_type = genomic DNA
tggcatgtaggcctgtaggggctatgcctatatgctcatgcactcatgtcgcgatgttgcgatatcgcgatggaccaaccaagcaagcgtgcagcgtgggcgcttgggccaagggtgctaagctaagtgtaagcactgaagtgctgaagtgctgaagtgctgaacgtggaacgtcaggatgacacatcctctcccttcggcttcgtccaagaaaggttggtcagccatctgagatctgagatctgaaatgaatataatgatgaattgagtcgatgagatctgactatcttgggagattgcaccaatgcgccacggtgaccagatggtcttggtcttagctggtatagtggcacctgatctgccttgacagatctcatgttcatacgttcatgcattcaatcttatcgtctagccgtctgcgatctgcccaactagacgacgacaaatgtaattgatccttgtaaccctgttgctggtcgcagcagcgcgatacgatgcc

SEQ ID NO: 159 - DNA, 500 bp, Moniliella pollinis
  source 1..500: mol_type = genomic DNA
aaatcttcatccagcgtagcaagcatatcgcgcatgtccgagttcctcgagtgtgcataccgaacccaaaaagccatggatgtcattgacctgctgtattcatcaatcgagatatctttactccggagcgtacagtggcagatattatgtaggagatgatgggacaggatgcagagatacataatccatttccagttaatagggccgctagatacttgatattagcctggcagcgagcgagcgagggtagagtagaatagagtccagtatagatcccaccccatggtgcgggaagtggatgacgtaatagcgcgatagctccccgctcccttgtcacctaggccacgggaccctacgtgattgcatcgtgcgtgtcgtcgcctgtcgacgcctggtgcaggcatacgctgcgtgcttcgacgatcaacaacaccaccaaccacgactccagttccggccagccagtaccatggcgtcgttctttgggtttagtgcaccgg

SEQ ID NO: 160 - DNA, 400 bp, Moniliella pollinis
  source 1..400: mol_type = other DNA
aaccagatcgaagctcaccccttgttgcaacaagacgagttggttgctcaccataagagcaagaacattgtcatcactgcttacagtcccttgggcaacaatgtcgctggtaaaccacctctgactgagaaccccggtattgtggatgctgctaagcgtttgaaccatactcctgctgctgtgctcattgcttggggtattcaacgcgggtacagcgtcttggtcaagtcagttacaccctcacggatcaagagtaactttgaacagatcactctgtctgatgaggaattccaacgggttaccaacctcatcaaggagtacggtgagagccgtaacaacgttcctttcaattacaagccttcgtggtccattgacgtctttggtacccaggacgaggcta

SEQ ID NO: 161 - DNA, 500 bp, Moniliella pollinis
  source 1..500: mol_type = genomic DNA
atcctgtgctcgtctcttacattcatcttcctgcccataaaactttcaagctatttcctccaacgtactcaacaacctatttttttgggccccgctcaaaacgcaccttattgcgtctaagtgtattctaaccacgcgacctgaattgcaaagcctgttacccccatcgcaccttcgtcttaagatagttgtttaacgagccttggccagttttagccttgaccatgactacagatcataatggttagatgcttcttgatcgataatgatatattgcatgtcgacgattgaagatttattggatgtcgatgacgactgtcgagctcttattcttagcaacaacttaaatattcactatcgaatgcacgcgacatcatgcatcgtgctcatgaatatcactggatcactctcgatcgcagcccactaggtcagcataacacgcttgaagctgacttgaagctttggaacaaatggcagcaacagtggcggtcacggtgacc

SEQ ID NO: 162 - DNA, 486 bp, Moniliella pollinis
  source 1..486: mol_type = genomic DNA
attgttgcatcgtctcatcagatcgtccttcattgtagtgataattggtgcaaccttgtattagactgtatagcagaatccctcgctataaaaagtattatgcatacgcagttccaagcaggaattagtatggtagtgggacttggctgaagggctgacgacatggcgagaaaaacgtatcaattcggaacacactgtgcaatgtcgatcacgttttcggtggttcacggtaggcttcctagtccatgggaaagtggtaacatctatcccttgagcgcttgagcttaatgttaccttgtgcaaaagtcatttgaagcttcacttgaagcttgaagctttgaagttttgaagcttgaagcgcaaacagcagcggtacatgtatactggcgtaacctgcctacagtggtgcatcagtacgtcaagcgggtagcccgaaatctcattaaggtcatttgccctctaagcttagtacctagtgatctgttc

SEQ ID NO: 163 - DNA, 501 bp, Moniliella pollinis
  source 1..501: mol_type = genomic DNA
cctgaacgtcctgaactctgtcttattacataccattaatttccctgccttccctctctacgtcatcggaattttatctcttcctgagcagcaaagatttggtccttgtccgggatacaacggagagtcatgattgggtttatggaagagaggcgatagcacttgcattttgaccattcggggattaagcgaacccccaagtggcacaaagagctcgtatgagggtcagtaagtatagagggacatgcaaaggagagaaaaggaaacacaatattgacaaatagagacaagtacaggtgatcgcaatagcatgatgtaggggtatgcgcaagtcacaatcgttcagggcgggcataacatcagcgtacccgagcacaatggttaatgattaatgagcagaggaaaaaataatgattatgccggggatggcaggactaactggcgcagctcttcagcttcggcaacgcgtgcacatagtggtgtagcaccacgagattgagc

SEQ ID NO: 164 - DNA, 493 bp, Moniliella pollinis
  source 1..493: mol_type = genomic DNA
cctttgcctcacgcctctcgtttgcacgcttcttcacggcttatcaccgcttattatatccatggaatcccctccaaagttttcttcaacatagcttcatatcttctaccataacatctatcccaccaagtagcacatgaattcaacgtagcttgagaacttttcctcgtcagctgattgcgttctttaggcagtttgcttctaccccaattgcttctaccccaattgcttctgcttatttcaccagtccgctcggagatctctgacaactctgagatctgatgatcaacctcttgtgcaacttgtaaaatttgatcgatgagacgattagggacttgaagctttaagttagacgcgatgggcggtaatctatatgcttagactttgttgctatgtttgtcctataagatctgatgcatgatgtatcattacccagacgggctatcgcacaaggtgcagatgcatcttatcatgacagtgccacactgttggc

SEQ ID NO: 165 - DNA, 567 bp, Moniliella pollinis
  source 1..567: mol_type = genomic DNA
gcttgctggtcacattattgtcagtacctaccatgaagaattcaatattattttacattgtcaaccattacatggatcccatgttgtgcatagcctctatgtcatcctttggtcttttatgtctgtagcgtgctagtagtattcaagttgtagcactgctgtgaaacagtacgttcaagtagtgtgcagcagtacgttcagttagtggactggggcagcctcgccttcagcaaaggttaggtacatgagccagttgctcactcttgctttctacgaatcccataggctactttgccccctaaccgtgacgaccccctgtgtttgagaagtttgagtctttttacgttaccgtgaccaagcgagcagagtagaaactcttgaagttgtgtatgtaagaatacaaattgagaacacaaggttacctacctttatagttggtaaacagcaagcaataccagagattttcatcgcaacgtgactctatcattcactatattaagttgcacacggatgttgtacaacactacacgtaaaagagagaaaaatactaatgtcgatcgctcaggt

SEQ ID NO: 166 - DNA, 504 bp, Moniliella pollinis
  source 1..504: mol_type = genomic DNA
ttgctgctacgacctcattgatcgatgatctccgacactttgagtagctttccatcctctctttactgtactttgtattcttgctactttgtgttctttcttaatggtcccgaaccggtgattttgctcatgatctttttttttttttttcgtcaactgcaagaagatgaaaaatctactgttcgatagcacctcataaccgttccagagtcccgacaaccacaaggatgtttcttagataggtgtcagcaagatccacaaaaaagtgtaggtattagatggtttcaagcaaggtacaatattctaattcaatactcatttgaataatcaatattcaacagcttctagcctacaagcttcaatgttctccgtcggttaactcagtatacttagtactcagttcaagtcagtgttgttaaaataaaatcacgtgatccaaaaacttgaaacttttcatttttctcctcagatgttggtgattcgtcccatagcggttaccacaac

SEQ ID NO: 167 - DNA, 1679 bp, synthetic construct
  source 1..1679: mol_type = other DNA
aagacctctgtcccacaaaccttgatggtctgtgaaaccgtcaacaacatcattggtagaactgtcaatccaagaaacaaaaattggtcctgtggtggttcttctggtggtgaaggtgctattgttggtattagaggtggtgttattggtgtcggtactgacattggtggttccattagagtcccagctgctttcaactttttatacggtttgagaccatctcacggtagattgccatatgctaaaatggctaactctatggaaggtcaagaaaccgttcactccgtcgttggtcctatcactcactccgtcgaagacttgagattgttcaccaaatctgtcttgggtcaagaaccttggaagtacgactctaaggtcatccccatgccatggagacaatctgaatctgacatcattgcctctaagattaagaatggtggtttgaacattggttattacaatttcgacggtaacgtcttgccacacccaccaattttacgtggtgtcgaaactaccgttgccgctttggccaaggctggtcacaccgttactccatggactccatacaagcatgatttctgtcatgacttgatttcccacatctatgctgctgatggttctgccgacgtcatgagagacatttctgcctctggtgagccagccatccctaacattaaggacttgttgaacccaaatattaaggctgttaacatgaacgaattgtgggacactcatttacaaaagtggaactatcaaatggaatacttggaaaagtggcgtgaagctgaagaaaaagctggtaaggaattggacgctattatcgctccaattactcctaccgtcgctgtcagacacgatcaattcagatactacggttacgcctccgttattagcttattggatttcacctctgttgtcgtcccagtcactttcgctgataagaatattgataagaagaacgaatcttttaaagctgtttccgaattggatgctttggttcaagaagaatacgacccagaggcttatcacggtgctcctgttgctgttcaagttattggtagaagattgtccgaagagagaactttggctatcgccgaagaagtcggtaaattgttgggtaacgtcgtcactccataatggtgttcaccactgttgcttcccctttgttggagcgtccgtcgttctgatggcgctctgagcccaaaatatcccttcttcgcccgagagcaagcctcggagtgtgcttgcaatctacttttcctactaaagttatcttcttgtggcttctgaatttgaatagaacgtgttcagacttgttagctaaatttgttgatgcgagatacttgacagaatcccgttgatgaactcatctgtgtgaccaccgcctggtgatggaatctcgcgcggaagccgtggtgttactgactctcaagcaattcagtagataaatttgtataacatcattgcaaggggtgctagcaatcaattgtccaataccaaacggcggcaagtgcaaaggggcgatagagagtttctgcgaggaagggaaggaatccgtatgcctgaaaacttttgtacaagtgtctttgtaagggcgaggtctgctctgacatctctctgagatctgagatctgatacctgcaggataacttcgtataatgtatgctatacgaagttat

SEQ ID NO: 168 - DNA, 876 bp, synthetic construct
  source 1..876: mol_type = other DNA
agatgtagccggcgctgtagagttttggacggataggttgggtttcagtcgagacttcgttgaagatgactttgcaggcgtcgtgcgtgatgatgtgaccctgtttatctcggccgttcaagatcaagttgtccctgacaatacacttgcatgggtctgggtacgcggattagatgaattgtacgcggaatggtctgaagttgtatccactaactttcgtgacgcttcaggtcctgctatgactgagattggtgaacaaccctgggggcgtgagttcgcactccgagatccagctggaaattgtgttcatttcgtagctgaggaacaggattaatggtgttcaccactgttgcttcccctttgttggagcgtccgtcgttctgatggcgctctgagcccaaaatatcccttcttcgcccgagagcaagcctcggagtgtgcttgcaatctacttttcctactaaagttatcttcttgtggcttctgaatttgaatagaacgtgttcagacttgttagctaaatttgttgatgcgagatacttgacagaatcccgttgatgaactcatctgtgtgaccaccgcctggtgatggaatctcgcgcggaagccgtggtgttactgactctcaagcaattcagtagataaatttgtataacatcattgcaaggggtgctagcaatcaattgtccaataccaaacggcggcaagtgcaaaggggcgatagagagtttctgcgaggaagggaaggaatccgtatgcctgaaaacttttgtacaagtgtctttgtaagggcgaggtctgctctgacatctctctgagatctgagatctgatacctgcaggataacttcgtataatgtatgctatacgaagttat

SEQ ID NO: 169 - DNA, 1087 bp, synthetic construct
  source 1..1087: mol_type = other DNA
gaagactgagtccgtctcagataacttcgtataatgtatgctatacgaagttatcctgcaggagctcagaccttgcatgttagccttgaccttgcctctatgaccactaattcgcacaagattgcacgttaccattgtcatcttgccatgtatccaatgtttcctgtttgccatagtacgtagtagatacatcgatcatcgatgcagatgacgcagatggcattggttcgctttgccctatgcatgcatcatgcatcatgcatcatgcgtcatgcgtcactatccatattaatcattgccctctgtactaggccatgacacctgcagacccttccccagggatgcttcttgtaatagccaatatactacacaactttaccgattacgatcgagatcgatctcactatagtttgtcgaacttcgatgcacatcgagggtgcggaaaaaagctgacggaagcggaagtgggtgaattggttaatttagttagattggcagggttgttcccaagattcaacgcaagctgagaaagaaaacagaaacacgaggcataaggccagtcagaaaatgcattacgaggggagttgaagtgactgtgggccagtgcctgggtcgtcatgtgcaaattttttcttcggttagactgccgcagcatgcagcaactctgccggccctatataactagtgcttcatcttcttgtcattcttgtctctttaccaacacaccggtactctttcaccatggcaaagttgacgagcgccgtgccggtgctaaccgcgagagatgtagccggcgctgtagagttttggacggataggttgggtttcagtcgagacttcgttgaagatgactttgcaggcgtcgtgcgtgatgatgtgaccctgtttatctcggccgttcaagatcaagttgtccctgacaatacacttgcatgggtctgggtacgcggattagatgaattgtacgcggaatggtctgaagttgtatccactaactttcgtgacgcttcaggtcctgctatgactgagattggtgaacaaccctgggggcgtgagttcgcactccgagatccagctggaaattgtg

SEQ ID NO: 170 - DNA, 1257 bp, synthetic construct
  source 1..1257: mol_type = other DNA
gaagactgagtccgtctcagataacttcgtataatgtatgctatacgaagttatcctgcaggagctcagaccttgcatgttagccttgaccttgcctctatgaccactaattcgcacaagattgcacgttaccattgtcatcttgccatgtatccaatgtttcctgtttgccatagtacgtagtagatacatcgatcatcgatgcagatgacgcagatggcattggttcgctttgccctatgcatgcatcatgcatcatgcatcatgcgtcatgcgtcactatccatattaatcattgccctctgtactaggccatgacacctgcagacccttccccagggatgcttcttgtaatagccaatatactacacaactttaccgattacgatcgagatcgatctcactatagtttgtcgaacttcgatgcacatcgagggtgcggaaaaaagctgacggaagcggaagtgggtgaattggttaatttagttagattggcagggttgttcccaagattcaacgcaagctgagaaagaaaacagaaacacgaggcataaggccagtcagaaaatgcattacgaggggagttgaagtgactgtgggccagtgcctgggtcgtcatgtgcaaattttttcttcggttagactgccgcagcatgcagcaactctgccggccctatataactagtgcttcatcttcttgtcattcttgtctctttaccaacacaccggtactctttcaccatgggaacgactttagatgataccgcctaccgttataggacatcagtaccgggcgatgcagaagcaattgaagcccttgatggatcattcaccacagacacagtttttcgcgtgacagctactggtgacggatttactctccgtgaagtgcctgtagatccgccattgacgaaagtatttccagatgatgagagtgatgacgagagcgatgatggcgaagatggtgatcctgactcgcgcactttcgtcgcatacggtgatgatggtgacctggccggatttgttgttgtgtcctactcggggtggaaccgtagattgaccgtcgaagatatcgaagtcgcgccagaacatcgtggtcatggcgtgggacgagcactgatgggtctagctacggaattcgctcgagagcgtggggcgggtcacttatggcttgaagttaccaatgtaaatgctcctgctattcacgcttatcgccgaatgggtttcaccttgtgtggcctcgacacggcattgtat

SEQ ID NO: 171 - DNA, 1049 bp, synthetic construct
  source 1..1049: mol_type = other DNA
attgaagcccttgatggatcattcaccacagacacagtttttcgcgtgacagctactggtgacggatttactctccgtgaagtgcctgtagatccgccattgacgaaagtatttccagatgatgagagtgatgacgagagcgatgatggcgaagatggtgatcctgactcgcgcactttcgtcgcatacggtgatgatggtgacctggccggatttgttgttgtgtcctactcggggtggaaccgtagattgaccgtcgaagatatcgaagtcgcgccagaacatcgtggtcatggcgtgggacgagcactgatgggtctagctacggaattcgctcgagagcgtggggcgggtcacttatggcttgaagttaccaatgtaaatgctcctgctattcacgcttatcgccgaatgggtttcaccttgtgtggcctcgacacggcattgtatgacggtactgcttctgacggggagcaagcgctatacatgtctatgccctgcccctaatggtgttcaccactgttgcttcccctttgttggagcgtccgtcgttctgatggcgctctgagcccaaaatatcccttcttcgcccgagagcaagcctcggagtgtgcttgcaatctacttttcctactaaagttatcttcttgtggcttctgaatttgaatagaacgtgttcagacttgttagctaaatttgttgatgcgagatacttgacagaatcccgttgatgaactcatctgtgtgaccaccgcctggtgatggaatctcgcgcggaagccgtggtgttactgactctcaagcaattcagtagataaatttgtataacatcattgcaaggggtgctagcaatcaattgtccaataccaaacggcggcaagtgcaaaggggcgatagagagtttctgcgaggaagggaaggaatccgtatgcctgaaaacttttgtacaagtgtctttgtaagggcgaggtctgctctgacatctctctgagatctgagatctgatacctgcaggataacttcgtataatgtatgctatacgaagttat

SEQ ID NO: 172 - DNA, 1199 bp, synthetic construct
  source 1..1199: mol_type = other DNA
cttaaacacggcaagggtagcgttgcaaacgacgtaaccgacgaaatggtccgtctgaattggctaactgagttcatgccactccccaccatcaagcacttcatccgtacacctgacgatgcgtggctgttgactacggccatccccggtaagaccgcttttcaggtcctcgaggaataccctgactcgggcgagaacatcgtggatgccttggctgtgtttttgcgccgccttcactctattccggtctgcaactgccctttcaacagcgaccgtgtttttaggcttgcccaggcacaatcacgcatgaacaatggtctagtcgacgctagtgatttcgatgacgagcgcaacggctggccggtggaacaagtgtggaaagagatgcataagctcctgcccttttccccagactctgtcgtgacgcatggtgatttctcgcttgacaacctcatctttgacgagggcaagctcattggctgcattgacgtcggccgggttggcatcgccgatcgctaccaagatcttgcgatcctctggaattgtctgggcgagttctcccctagcctccagaagcgtctgttccagaaatatgggatcgataacccagacatgaacaagctccagttccatttgatgctggatgaatttttctaatggtgttcaccactgttgcttcccctttgttggagcgtccgtcgttctgatggcgctctgagcccaaaatatcccttcttcgcccgagagcaagcctcggagtgtgcttgcaatctacttttcctactaaagttatcttcttgtggcttctgaatttgaatagaacgtgttcagacttgttagctaaatttgttgatgcgagatacttgacagaatcccgttgatgaactcatctgtgtgaccaccgcctggtgatggaatctcgcgcggaagccgtggtgttactgactctcaagcaattcagtagataaatttgtataacatcattgcaaggggtgctagcaatcaattgtccaataccaaacggcggcaagtgcaaaggggcgatagagagtttctgcgaggaagggaaggaatccgtatgcctgaaaacttttgtacaagtgtctttgtaagggcgaggtctgctctgacatctctctgagatctgagatctgatacctgcaggataacttcgtataatgtatgctatacgaagttat

SEQ ID NO: 173 - DNA, 1621 bp, synthetic construct
  source 1..1621: mol_type = other DNA
tattctggtacgagccatcccaaaaatggatcatgacagctgccaagagccaggactataagattgagatctacagcagcgatgacctcaagtcctggaagctcgaaagcgcctttgcgaacgaaggctttcttggctatcagtatgagtgccccggcctcatcgaggtgcctaccgagcaagatcctagcaagagctactgggtgatgttcatctctatcaatccgggagcacccgcgggcggctccttcaaccagtattttgtgggttcgttcaacggaacgcactttgaagcttttgataatcagtcaagagtcgtcgactttggcaaagactactacgccctccagaccttctttaacacggatccaacgtacggttcggcactgggcatcgcgtgggcgtcgaactgggagtatagcgcctttgtccccactaacccttggcgctcgtcgatgtcgttagtgcgtaagttctcgctgaacaccgagtaccaggcaaatccggagacagaactaatcaaccttaaggcagagcctatcttgaacatctctaacgccggaccctggtctaggttcgccaccaacaccacgctcactaaggccaatagttacaatgtcgatctaagcaattcaacgggcacactggaattcgagctcgtttacgcagtcaacaccacccagacgatctcgaaatccgtctttgcagatttgtcgctgtggttcaagggccttgaggacccggaagagtacctccgcatgggttttgaagtctcagcgtcatcgttcttcctcgaccgcgggaattctaaggtaaagttcgtgaaggaaaacccctactttaccaatcgtatgtctgtgaacaatcagccattcaaatcggagaacgacctgtcctactacaaggtttacggccttctcgaccaaaacatcctcgagttgtactttaacgacggtgatgttgtgtcgacaaacacttatttcatgacaacgggaaacgctctcggatccgtcaatatgactacgggtgtcgacaatctgttttacattgacaaattccaggtgcgagaagtcaagtaatggtgttcaccactgttgcttcccctttgttggagcgtccgtcgttctgatggcgctctgagcccaaaatatcccttcttcgcccgagagcaagcctcggagtgtgcttgcaatctacttttcctactaaagttatcttcttgtggcttctgaatttgaatagaacgtgttcagacttgttagctaaatttgttgatgcgagatacttgacagaatcccgttgatgaactcatctgtgtgaccaccgcctggtgatggaatctcgcgcggaagccgtggtgttactgactctcaagcaattcagtagataaatttgtataacatcattgcaaggggtgctagcaatcaattgtccaataccaaacggcggcaagtgcaaaggggcgatagagagtttctgcgaggaagggaaggaatccgtatgcctgaaaacttttgtacaagtgtctttgtaagggcgaggtctgctctgacatctctctgagatctgagatctgatacctgcaggataacttcgtataatgtatgctatacgaagttat

SEQ ID NO: 174 - DNA, 1903 bp, synthetic construct
  source 1..1903: mol_type = other DNA
ataacttcgtataatgtatgctatacgaagttatcctgcaggagctcagaccttgcatgttagccttgaccttgcctctatgaccactaattcgcacaagattgcacgttaccattgtcatcttgccatgtatccaatgtttcctgtttgccatagtacgtagtagatacatcgatcatcgatgcagatgacgcagatggcattggttcgctttgccctatgcatgcatcatgcatcatgcatcatgcgtcatgcgtcactatccatattaatcattgccctctgtactaggccatgacacctgcagacccttccccagggatgcttcttgtaatagccaatatactacacaactttaccgattacgatcgagatcgatctcactatagtttgtcgaacttcgatgcacatcgagggtgcggaaaaaagctgacggaagcggaagtgggtgaattggttaatttagttagattggcagggttgttcccaagattcaacgcaagctgagaaagaaaacagaaacacgaggcataaggccagtcagaaaatgcattacgaggggagttgaagtgactgtgggccagtgcctgggtcgtcatgtgcaaattttttcttcggttagactgccgcagcatgcagcaactctgccggccctatataactagtgcttcatcttcttgtcattcttgtctctttaccaacacaccggtactctttcaccatgccacaatcctgggaagaattggccgccgacaaacgtgcccgtttggctaaaaccattcctgacgaatggaaggttcaaactttgcctgccgaagattccgttattgatttcccaaagaagtccggtattttgtctgaggctgaattgaagattaccgaagcctctgctgctgatttggtttccaagttggccgctggtgagttgacttctgttgaagtcactttggctttttgtaagagagctgctattgctcaacaattaaccaactgtgctcacgaattcttcccagatgctgctttagctcaagctagagaattagatgaatactacgctaagcataagcgtccagttggtccattacacggtttaccaatctctttaaaggaccaattgcgtgttaagggttacgaaacctccatgggttacatttcctggttaaacaaatacgatgaaggtgattccgtcttaaccaccatgttgagaaaagctggtgctgttttctacgttaagacctctgtcccacaaaccttgatggtctgtgaaaccgtcaacaacatcattggtagaactgtcaatccaagaaacaaaaattggtcctgtggtggttcttctggtggtgaaggtgctattgttggtattagaggtggtgttattggtgtcggtactgacattggtggttccattagagtcccagctgctttcaactttttatacggtttaagaccatctcacggtagattgccatatgctaaaatggctaactctatggaaggtcaagaaaccgttcactccgtcgttggtcctatcactcactccgtcgaagacttgagattgttcaccaaatctgtcttgggtcaagaaccttggaagtacgactctaaggtcatccccatgccatggagacaatctgaatctgacatcattgcctctaagattaagaatggtggtttgaacattggttattacaatttcgacggtaacgtcttgccacacccaccaattttacgtggtgtcgaaactaccgttgccgctttggccaaggctggtcacaccgttactccatggactccatacaagcatgatttctgtcatgacttgatttcccacatctatgctgctgatggttctgccgacgtcatgagagacatttctgcctctggtgagccagccatccctaac

SEQ ID NO: 175 - DNA, 1475 bp, synthetic construct
  source 1..1475: mol_type = other DNA
ataacttcgtataatgtatgctatacgaagttatcctgcaggagctcagaccttgcatgttagccttgaccttgcctctatgaccactaattcgcacaagattgcacgttaccattgtcatcttgccatgtatccaatgtttcctgtttgccatagtacgtagtagatacatcgatcatcgatgcagatgacgcagatggcattggttcgctttgccctatgcatccatcatgcatcatgcatcatgcatcatgcgtcactatccatattaatcattgccctctgtactaggccatgacacctgcagacccttccccagggatgcttcttgtaatagccaatatactacacaactttaccgattacgatcgagatcgatctcactatagtttgtcgaacttcgatgcacatcgagggtgcggaaaaaagctgacggaagcggaagtgggtgaattggttaatttagttagattggcagggttgttcccaagattcaacgcaagctgagaaagaaaacagaaacacgaggcataaggccagtcagaaaatgcattacgaggggagttgaagtgactgtgggccagtgcctgggtcgtcatgtgcaaattttttcttcggttagactgccgcagcatgcagcaactctgccggccctatataactagtgcttcatcttcttgtcattcttgtctctttaccaacacaccggtactctttcaccatgggtaaggaaaagacacacgtatcgcgaccccgactcaactccaacatggacgcagacctgtacggatacaaatgggctcgagataatgtcggacagtcgggtgcgacgatctacagactctatggaaaaccggacgcccccgagctctttcttaaacacggcaagggtagcgttgcaaacgacgtaaccgacgaaatggtccgtctgaattggctaactgagttcatgccactccccaccatcaagcacttcatccgtacacctgacgatgcgtggctgttgactacggccatccccggtaagaccgcttttcaggtcctcgaggaataccctgactcgggcgagaacatcgtggatgccttggctgtgtttttgcgccgccttcactctattccggtctgcaactgccctttcaacagcgaccgtgtttttaggcttgcccaggcacaatcacgcatgaacaatggtctagtcgacgctagtgatttcgatgacgagcgcaacggctggccggtggaacaagtgtggaaagagatgcataagctcctgcccttttccccagactctgtcgtgacgcatggtgatttctcgcttgacaacctcatctttgacgagggcaagctcattggctgcattgacgtcggccgggttggcatcgccgatcgctaccaagatcttgcgatcctctggaattgtctgggcgagttctcccctagcctccagaagcgtctgttccagaaatatgggatcg

SEQ ID NO: 176 - DNA, 1982 bp, synthetic construct
  source 1..1982: mol_type = other DNA
ataacttcgtataatgtatgctatacgaagttatcctgcaggagctcagaccttgcatgttagccttgaccttgcctctatgaccactaattcgcacaagattgcacgttaccattgtcatcttgccatgtatccaatgtttcctgtttgccatagtacgtagtagatacatcgatcatcgatgcagatgacgcagatggcattggttcgctttgccctatgcatgcatcatgcatcatgcatcatgcgtcatgcgtcactatccatattaatcattgccctctgtactaggccatgacacctgcagacccttccccagggatgcttcttgtaatagccaatatactacacaactttaccgattacgatcgagatcgatctcactatagtttgtcgaacttcgatgcacatcgagggtgcggaaaaaagctgacggaagcggaagtgggtgaattggttaatttagttagattggcagggttgttcccaagattcaacgcaagctgagaaagaaaacagaaacacgaggcataaggccagtcagaaaatgcattacgaggggagttgaagtgactgtgggccagtgcctgggtcgtcatgtgcaaattttttcttcggttagactgccgcagcatgcagcaactctgccggccctatataactagtgcttcatcttcttgtcattcttgtctctttaccaacacaccggtactctttcaccatgttgcttcaagctttcctttttctgctcgctggtttcgccgctaagattagcgctagcatgacgaacgaaacctctgaccggccgttggtccacttcacccccaacaagggttggatgaacgacccaaacggcctctggtatgatgagaaagacgctaagtggcacctgtacttccagtataaccctaacgatacagtttggggtacgcccttgttttggggccatgcgacctccgacgacctcaccaactgggaagatcagcctatcgcgattgctccgaagcgtaacgattcaggtgcctttagtggcagtatggtcgtagactacaacaacaccagcggtttcttcaacgacactatcgatccacgacagcgctgtgttgccatatggacctacaacacgccggagtccgaggaacaatacattagttactcgctggacgggggatacacctttacagagtaccagaaaaatcccgtcctcgccgcaaactcgactcaattccgcgatcctaaggtattctggtacgagccatcccaaaaatggatcatgacagctgccaagagccaggactataagattgagatctacagcagcgatgacctcaagtcctggaagctcgaaagcgcctttgcgaacgaaggctttcttggctatcagtatgagtgccccggcctcatcgaggtgcctaccgagcaagatcctagcaagagctactgggtgatgttcatctctatcaatccgggagcacccgcgggcggctccttcaaccagtattttgtgggttcgttcaacggaacgcactttgaagcttttgataatcagtcaagagtcgtcgactttggcaaagactactacgccctccagaccttctttaacacggatccaacgtacggttcggcactgggcatcgcgtgggcgtcgaactgggagtatagcgcctttgtccccactaacccttggcgctcgtcgatgtcgttagtgcgtaagttctcgctgaacaccgagtaccaggcaaatccggagacagaactaatcaaccttaaggcagagcctatcttgaacatctctaacgccggaccctggtctaggttcgccaccaacaccacgctcactaaggccaatagttacaatgtcgatctaagcaattcaacgggcacactggaattcgagctcgtttacgcagtcaacaccacccagacgatctcgaaatccgtctttgcagatttgtcgctgtggttcaagggccttgaggacc

SEQ ID NO: 177 - DNA, 4289 bp, synthetic construct
  source 1..4289: mol_type = other DNA
cttaaacacggcaagggtagcgttgcaaacgacgtaaccgacgaaatggtccgtctgaattggctaactgagttcatgccactccccaccatcaagcacttcatccgtacacctgacgatgcgtggctgttgactacggccatccccggtaagaccgcttttcaggtcctcgaggaataccctgactctggcgagaacatcgtggatgccttggctgtgtttttgcgccgccttcactctattccggtctgcaactgccctttcaacagcgaccgtgtttttaggcttgcccaggcacaatcacgcatgaacaatggtctagtcgacgctagtgatttcgatgacgagcgcaacggctggccggtggaacaagtgtggaaagagatgcataagctcctgcccttttccccagactctgtcgtgacgcatggtgatttctcgcttgacaacctcatctttgacgagggcaagctcattggctgcattgacgtcggccgggttggcatcgccgatcgctaccaagatcttgcgatcctctggaattgtctgggcgagttctcccctagcctccagaagcgtctgttccagaaatatgggatcgataacccagacatgaacaagctccagttccatttgatgctggatgaatttttctaatggtgttcaccactgttgcttcccctttgttggagcgtccgtcgttctgatggcgctctgagcccaaaatatcccttcttcgcccgagagcaagcctcggagtgtgcttgcaatctacttttcctactaaagttatcttcttgtggcttctgaatttgaatagaacgtgttcagacttgttagctaaatttgttgatgcgagatacttgacagaatcccgttgatgaactcatctgtgtgaccaccgcctggtgatggaatctcgcgcggaagccgtggtgttactgactctcaagcaattcagtagataaatttgtataacatcattgcaaggggtgctagcaatcaattgtccaataccaaacggcggcaagtgcaaaggggcgatagagagtttctgcgaggaagggaaggaatccgtatgcctgaaaacttttgtacaagtgtctttgtaagggcgaggtctgctctgacatctctctgagatctgagatctgatacctgcaggataacttcgtataatgtatgctatacgaagttatgtcacagtatcggcatctctgtctttagctacgatggtgtgcgtgtaactgatcagtacacccgctgtatcaaaactctatcttcaatccgctaagaatcgtcaccatcagtacatcagtacatcagtgggctaagatctaatggtgtcgttcgacggccgcgggcactagccacgagccaagagcggtacagttgctgcgaaatggtgggcagcctgacaggttcagtttgaataggatgaaaacgccatgaagaacagagaagctggcaattgacgatagtggggcgagcgcacgctgcttgctggtccgagcgtaggacgaacgacaaaccatgggcggggccaccaggccccagggagggcgtcactggttggatgtcgtctgttaggctagagctcaggcgctcagggcctctggcccaagcctcggacgcaagcctctgacgagcgagcgcgcgctggggcgggtctgcgcaggaacggcaggactgccgagttggttgaatattgaatggttggatgattggtttgctgggtttggttttgacacgcacggcacaggacaagtgagtttggaggttggatttgcgcaggtagaaagggcgctcggcctcagggcctcagcgtcagcagacgagctcgccagtccaggtcagtacccagtgttcgttacttcccaccgtccagagtttgctgctgcctctcagcttgattcgtgtcggagaagtagaaatggtcacagcgtaccacacactgtccccatgcctgcgtcctgctccacgagtgtttagccacaaaaatttatggacaaccttactgagcctgtgctggggggtgctttagcaccagcactggcgccatggcgtcaaggttaattccactgtcattcgacaaccttcaactgatgggggcaactgggcacaaaaccttggatatataaccaactccaactcccacggttttttaccttttgctcttctccccaggactcactacttctactcctctattcatcttcaccaaaatgaaagccgcggtcctccatggaacgaacgacatgcgcttcgaggatattgaaatcaagccgtgcgaaagcgacgaggtcaagatcaaggtcatggccgctggcatttgtggatctgatcccccccgagtgctgaaacattggaagtatcctgttccggctattcctggacatgagttctctggtgttatcgcggaggtcggaaaagatgtgaaaaatgtcaaggtgggtgaccgagttgtggcgatcccctttattccgtgtaatgaatgtgagtactgtaaacgaggtctttttagcctttgtgacgatcacggaatgctgggtgccaaatcctttggagcatttgccgagtatgtgaacattaaggcgactaatgtccttcccatcggcgatatggatttcgaagacgcagcgatgattgagccccttgccgtcgccatgcacggagtgttgaacatcggagttcaagtgggagatacggtcgccgtcatgggctcgggcacaatgggtcaacttgtgattcagggtcttaaaattgctggtgctggcactatcattgctgttgacatttctgataacaaactgcgagagtccaaggaattgggcgctgacattatcattaacgcaaaggacattaaccctgttgaaaaaatcaaagagcttacaggcggaaaaggagtggacatcgctctggaatgtgcgggttccaaaattacccaagagcaatgcctcttgatcactaaaaaaaagtcgaagatcggtttcctgggaattgcgtactctgacattaccttgtcggaggaggcgttcgagaacatctttcgcaaagagctcgaacttaaaggattctggaacagctattcggcaccctttcctggccaagagtggaccaagggcattaatcttgttaacgagggaaaaattaagctgaaggaaatggtttcgcaccgcttttctcttgaggatacgtataaagcgttcgagatgatccgagatcgcaaggaagagtttaacaaaatcctgatccttccccagggcgtggaaaaataacacggatcaacaaaaatgtgcgccagctttgttgtgtgcccttttcctctagcggatcctatccacatttcgtgaatgaaccgattaagctctgacgagatttccttgttttctgtagatacctcttgtagaggtgtcaaagttatgttgtgatcgagagagttacctgcaaggtattatgcaagcggcttgatgaggacactcaactacgtgtgagtaggagtgcgttgctcagcagttgacgcgtgagccgcttgagcagcttgataaaggtcctaatcgtcttccagctgttggcagacgacaatgtgctgtagtagtaggataggcccgtaaaagtgtagaagcaataggttgagactgactgtaatgggtacttgcgttcaaagactgaaagtccaaaggattgctcaaaggcccctgaggtctgagcctctgagcgcgctcttcgtcaaaattcgccggggccatcggtcatcctctcgagggcagcatcttcctgcttgaagactgagtccgtctcagattgttgcatcgtctcatcagatcgtccttcattgtagtgataattggtgcaaccttgtattagactgtatagcagaatccctcgctataaaaagtattatgcatacgcagttccaagcaggaattagtatggtagtgggacttggctgaagggctgacgacatggcgagaaaaacgtatcaattcggaacacactgtgcaatgtcgatcacgttttcggtggttcacggtaggcttcctagtccatgggaaagtggtaacatctatcccttgagcgcttgagcttaatgttaccttgtgcaaaagtcatttgaagcttcacttgaagcttgaagctttgaagttttgaagcttgaagcgcaaacagcagcggtacatgtatactggcgtaacctgcctacagtggtgcatcagtacgtcaagcgggtagcccgaaatctcattaaggtcatttgccctctaagcttagtacctagtgatctgttc

SEQ ID NO: 178 - DNA, 4286 bp, synthetic construct
  source 1..4286: mol_type = other DNA
cttaaacacggcaagggtagcgttgcaaacgacgtaaccgacgaaatggtccgtctgaattggctaactgagttcatgccactccccaccatcaagcacttcatccgtacacctgacgatgcgtggctgttgactacggccatccccggtaagaccgcttttcaggtcctcgaggaataccctgactctggcgagaacatcgtggatgccttggctgtgtttttgcgccgccttcactctattccggtctgcaactgccctttcaacagcgaccgtgtttttaggcttgcccaggcacaatcacgcatgaacaatggtctagtcgacgctagtgatttcgatgacgagcgcaacggctggccggtggaacaagtgtggaaagagatgcataagctcctgcccttttccccagactctgtcgtgacgcatggtgatttctcgcttgacaacctcatctttgacgagggcaagctcattggctgcattgacgtcggccgggttggcatcgccgatcgctaccaagatcttgcgatcctctggaattgtctgggcgagttctcccctagcctccagaagcgtctgttccagaaatatgggatcgataacccagacatgaacaagctccagttccatttgatgctggatgaatttttctaatggtgttcaccactgttgcttcccctttgttggagcgtccgtcgttctgatggcgctctgagcccaaaatatcccttcttcgcccgagagcaagcctcggagtgtgcttgcaatctacttttcctactaaagttatcttcttgtggcttctgaatttgaatagaacgtgttcagacttgttagctaaatttgttgatgcgagatacttgacagaatcccgttgatgaactcatctgtgtgaccaccgcctggtgatggaatctcgcgcggaagccgtggtgttactgactctcaagcaattcagtagataaatttgtataacatcattgcaaggggtgctagcaatcaattgtccaataccaaacggcggcaagtgcaaaggggcgatagagagtttctgcgaggaagggaaggaatccgtatgcctgaaaacttttgtacaagtgtctttgtaagggcgaggtctgctctgacatctctctgagatctgagatctgatacctgcaggataacttcgtataatgtatgctatacgaagttatgtcacagtatcggcatctctgtctttagctacgatggtgtgcgtgtaactgatcagtacacccgctgtatcaaaactctatcttcaatccgctaagaatcgtcaccatcagtacatcagtacatcagtgggctaagatctaatggtgtcgttcgacggccgcgggcactagccacgagccaagagcggtacagttgctgcgaaatggtgggcagcctgacaggttcagtttgaataggatgaaaacgccatgaagaacagagaagctggcaattgacgatagtggggcgagcgcacgctgcttgctggtccgagcgtaggacgaacgacaaaccatgggcggggccaccaggccccagggagggcgtcactggttggatgtcgtctgttaggctagagctcaggcgctcagggcctctggcccaagcctcggacgcaagcctctgacgagcgagcgcgcgctggggcgggtctgcgcaggaacggcaggactgccgagttggttgaatattgaatggttggatgattggtttgctgggtttggttttgacacgcacggcacaggacaagtgagtttggaggttggatttgcgcaggtagaaagggcgctcggcctcagggcctcagcgtcagcagacgagctcgccagtccaggtcagtacccagtgttcgttacttcccaccgtccagagtttgctgctgcctctcagcttgattcgtgtcggagaagtagaaatggtcacagcgtaccacacactgtccccatgcctgcgtcctgctccacgagtgtttagccacaaaaatttatggacaaccttactgagcctgtgctggggggtgctttagcaccagcactggcgccatggcgtcaaggttaattccactgtcattcgacaaccttcaactgatgggggcaactgggcacaaaaccttggatatataaccaactccaactcccacggttttttaccttttgctcttctccccaggactcactacttctactcctctattcatcttcaccaaaatgaaagcttccatgctggaggacttgaacaaattcagcgtcaaagagatcgacatcccgtcccccaaaaaggatgaggtcgtcgtgaaggtgatggcggcaggcacgtgtggatccgattcgcataaaatgattagcggatggaaatatggctatcccgcggtgatgggacacgaattttctggaattgtgacacaactgggagaaaacgtgtccaacgtcagcgtcggtcaacacgtcgccgtggctcccttcattccctgcttcaagtgtcattattgtcaaatcggactcttccagatgtgtgaaaattattccatgctcggtcagcaaaaatttggaggtttcgagcaatacgtttccgtcccggcacgtaacgttctggacatcggcaagatgtcgttcgaggaaggtgcccttattgaaccgatggcagttgcggcccacgctgttatgggaattaaaccggagctgggtgatacagttgcggtcttcggcctcggtacagtcggagatcttgttgtccgtcttcttatttcctcgggagcgacaaacgtcattggcattgacattgacgaccagaagcttgaaaagggactggatgagggttgcacacacgtgatcaactctgccaaagagtctcttgaagaaaagatcatggaatacaccgacggtctgggtgtcgatatttccatggaatgcgccggcagcaaaatcactgaggagcaaacactgctcgttacgaaacgccgtggaaaggttggatttgtcggtattgcttatagcgacgttctgctccatcagaaagcatttgagaacatcttccgccacgagcttacggtgactggattttggaattcctattccgcaccatttcctggacgcgagtggaccaactcgatccaattggttaatcgtggtcgtatcaagatcaaagatctcattactcatcgatttgagcttgaagacatgcaaaaagcattcaatatgatcaccactcgttcggaatcgtttaataaggtcatgtttttccccaacggcatcaattaacacggatcaacaaaaatgtgcgccagctttgttgtgtgcccttttcctctagcggatcctatccacatttcgtgaatgaaccgattaagctctgacgagatttccttgttttctgtagatacctcttgtagaggtgtcaaagttatgttgtgatcgagagagttacctgcaaggtattatgcaagcggcttgatgaggacactcaactacgtgtgagtaggagtgcgttgctcagcagttgacgcgtgagccgcttgagcagcttgataaaggtcctaatcgtcttccagctgttggcagacgacaatgtgctgtagtagtaggataggcccgtaaaagtgtagaagcaataggttgagactgactgtaatgggtacttgcgttcaaagactgaaagtccaaaggattgctcaaaggcccctgaggtctgagcctctgagcgcgctcttcgtcaaaattcgccggggccatcggtcatcctctcgagggcagcatcttcctgcttgaagactgagtccgtctcagattgttgcatcgtctcatcagatcgtccttcattgtagtgataattggtgcaaccttgtattagactgtatagcagaatccctcgctataaaaagtattatgcatacgcagttccaagcaggaattagtatggtagtgggacttggctgaagggctgacgacatggcgagaaaaacgtatcaattcggaacacactgtgcaatgtcgatcacgttttcggtggttcacggtaggcttcctagtccatgggaaagtggtaacatctatcccttgagcgcttgagcttaatgttaccttgtgcaaaagtcatttgaagcttcacttgaagcttgaagctttgaagttttgaagcttgaagcgcaaacagcagcggtacatgtatactggcgtaacctgcctacagtggtgcatcagtacgtcaagcgggtagcccgaaatctcattaaggtcatttgccctctaagcttagtacctagtgatctgttc

SEQ ID NO: 179 - protein, 231 aa, Moniliella pollinis
MVTALIAPSVLASDLGNLTAECKRMLDNGADWLHMDVMDGHFVPNIVLGAPILASVSKDLPGAELDCHMMVSSPEKWIKDVAAAGGKSYTFHLEATNDPLDIVRQIKAAGMRASVAINPGTPSAEISDALAQSLDMILVMTVWPGAGGQKFIAECMPKVTELRRRFPDLNIEVDGGVGPKTIDKCAKAGANVIVAGTAIFGADRPRDVIHFLRSQVNEAQEKLREEWAKSG

SEQ ID NO: 180 - protein, 231 aa, Moniliella pollinis
MPVCLIAPSILASDMGALTAECKRMLDCGADWLHMDVMDGHFVPNIVLGAPILASISKSLPDAELDCHMMVSAPEKWIKDIAAAGGKSYTFHLEATNDPLDTVRQIKASGMRAAVAINPGTPSAEISDELASQLDMILVMTVWPGAGGQKFIGECMPKVTELRRRFPDLNIEVDGGVGPKTIEKCAKAGANVIVAGTAIFHAERPRDVIHFLRTQVNEAQAQLKEEWAKSG

SEQ ID NO: 181 - DNA, 4064 bp, synthetic construct
  source 1..4064: mol_type = other DNA
gcgaggagtagttactaggtagcggtatagcaattccgcccataatgcataaccgttctccctaccaaaacaaaacaatggctacgtggccggcgtgcgtggccgacatggtgcgggtgcggggggcggggtacgagtgtggggagttcactagttcgctggctagctgactagctgaccggcgtgtggttgtggcagtacgcagtgggaaagattaaatatgaaatattgaatatcaaaatgacgtttggggtggcacgtgcgcgcgccaacaacaacaagagcagccaccaagccaaagcaccaagcaccaaccccgcacaccattttgttacacccgcggcagaaatggcgtcagccagcagtcactattactcaatattcaataggggttccacttgactcacttcctcatgtatatatatatccatctaatcttcccaatacataaccgtcatttagctacgatggtgtgcgtgtaactgatcagtacacccgctgtatcaaaactctatcttcaatccgctaagaatcgtcaccatcagtacatcagtacatcagtgggctaagatctaatggtgtcgttcgacggccgcgggcactagccacgagccaagagcggtacagttgctgcgaaatggtgggcagcctgacaggttcagtttgaataggatgaaaacgccatgaagaacagagaagctggcaattgacgatagtggggcgagcgcacgctgcttgctggtccgagcgtaggacgaacgacaaaccatgggcggggccaccaggccccagggagggcgtcactggttggatgtcgtctgttaggctagagctcaggcgctcagggcctctggcccaagcctcggacgcaagcctctgacgagcgagcgcgcgctggggcgggtctgcgcaggaacggcaggactgccgagttggttgaatattgaatggttggatgattggtttgctgggtttggttttgacacgcacggcacaggacaagtgagtttggaggttggatttgcgcaggtagaaagggcgctcggcctcagggcctcagcgtcagcagacgagctcgccagtccaggtcagtacccagtgttcgttacttcccaccgtccagagtttgctgctgcctctcagcttgattcgtgtcggagaagtagaaatggtcacagcgtaccacacactgtccccatgcctgcgtcctgctccacgagtgtttagccacaaaaatttatggacaaccttactgagcctgtgctggggggtgctttagcaccagcactggcgccatggcgtcaaggttaattccactgtcattcgacaaccttcaactgatgggggcaactgggcacaaaaccttggatatataaccaactccaactcccacggttttttaccttttgctcttctccccaggactcactacttctactcctctattcatcttcaccaaaatgccagtctgtctgatcgctccttccattttggcctcggacatgggagcactcacagccgagtgtaagcgaatgcttgactgtggtgctgattggctgcacatgggtacgttgccgtttcttgtgcgtacagaggtattgattgtttttatttatttattgacattgttatactacttctattctggcttgggatgcttgtgcagacgtcatggacgggtaagttctagtttgagcggaaagggtggctggggagaagggcacgagaataccgcctgcaaattgagtactgactgagtttggattctttttttgtttgccagccattttgtcccgaacattgttcttggggcccctatccttgcttcaatctctaaatctttacccgatgccgaactggattgccatatgatggtatctgctcctgaaaaggtacgtgtattaggtcccaaccaaaacttttgctgatggattcctgacatgcctctctctctccccccctccctctgcatacaccagtggatcaaagatatcgctgctgcaggcggcaagtcttacacttttcatctggaagcaacaagtacgatgacttttccttcctttcgagactcaagcagtgaactaaccatttgattggcacagatgaccccttggacactgtacgacagatcaaagcatccggtatgcgcgcagctgttgctattaacccaggaaccccctcagccgaaatttctgatgaactcgctagccaattggacatgatcctcgtaatgactgtctggccgggagctggtggacaaaagtttattggggaatgtatgcctaaagtaaccgaactacgacgtcgattccccgatttgaatattgaagtcgatggaggagttggacctaaaacgattgagaaatgtgccaaagctggtgccaatgttattgtggctggtactgctatcttccatgctgaacgtccaagggacgtaattcatttcctacgaacgcaagtgaatgaagctcaggctcaactgaaagaggaatgggccaagagcggttgataagttgctccctttgctgttctatgatccaaaagatgcttagtgctccactctctactcccgactaccttttacgcattctgacatgactagtagtgcaatgttacccctggtgttttctcgcaatcactttctgtctgctatagcttttgatcgtcagtagttttttggtatagctaaagtagacttttgtacctggcgttcaatgtaattttactccttttttgtgcgatgcaacagatggtgtaaagatcgtcgttaaagttttggcttgatgcttgattcggtgacggttgcttgggtgatccttatatcgtctcctggtgttctcataagcccaggctcttcttagctatgtacaacaggtccaccactgactatgttatgtagaggcatgcatttaacttacggaaagatttaatggagaagaacgtacctagtcagatgcttgacatgaaaacgtattcctgcaattcacaaatcagtatcctgcctgtccactcgcttgaagactgagtccgtctcagataacttcgtataatgtatgctatacgaagttatcctgcaggagctcagaccttgcatgttagccttgaccttgcctctatgaccactaattcgcacaagattgcacgttaccattgtcatcttgccatgtatccaatgtttcctgtttgccatagtacgtagtagatacatcgatcatcgatgcagatgacgcagatggcattggttcgctttgccctatgcatgcatcatgcatcatgcatcatgcgtcatgcgtcactatccatattaatcattgccctctgtactaggccatgacacctgcagacccttccccagggatgcttcttgtaatagccaatatactacacaactttaccgattacgatcgagatcgatctcactatagtttgtcgaacttcgatgcacatcgagggtgcggaaaaaagctgacggaagcggaagtgggtgaattggttaatttagttagattggcagggttgttcccaagattcaacgcaagctgagaaagaaaacagaaacacgaggcataaggccagtcagaaaatgcattacgaggggagttgaagtgactgtgggccagtgcctgggtcgtcatgtgcaaattttttcttcggttagactgccgcagcatgcagcaactctgccggccctatataactagtgcttcatcttcttgtcattcttgtctctttaccaacacaccggtactctttcaccatggcaaagttgacgagcgccgtgccggtgctaaccgcgagagatgtagccggcgctgtagagttttggacggataggttgggtttcagtcgagacttcgttgaagatgactttgcaggcgtcgtgcgtgatgatgtgaccctgtttatctcggccgttcaagatcaagttgtccctgacaatacacttgcatgggtctgggtacgcggattagatgaattgtacgcggaatggtctgaagttgtatccactaactttcgtgacgcttcaggtcctgctatgactgagattggtgaacaaccctggg

SEQ ID NO: 182 - DNA, 1375 bp, synthetic construct
  source 1..1375: mol_type = other DNA
agatgtagccggcgctgtagagttttggacggataggttgggtttcagtcgagacttcgttgaagatgactttgcaggcgtcgtgcgtgatgatgtgaccctgtttatctcggccgttcaagatcaagttgtccctgacaatacacttgcatgggtctgggtacgcggattagatgaattgtacgcggaatggtctgaagttgtatccactaactttcgtgacgcttcaggtcctgctatgactgagattggtgaacaaccctgggggcgtgagttcgcactccgagatccagctggaaattgtgttcatttcgtagctgaggaacaggattaatggtgttcaccactgttgcttcccctttgttggagcgtccgtcgttctgatggcgctctgagcccaaaatatcccttcttcgcccgagagcaagcctcggagtgtgcttgcaatctacttttcctactaaagttatcttcttgtggcttctgaatttgaatagaacgtgttcagacttgttagctaaatttgttgatgcgagatacttgacagaatcccgttgatgaactcatctgtgtgaccaccgcctggtgatggaatctcgcgcggaagccgtggtgttactgactctcaagcaattcagtagataaatttgtataacatcattgcaaggggtgctagcaatcaattgtccaataccaaacggcggcaagtgcaaaggggcgatagagagtttctgcgaggaagggaaggaatccgtatgcctgaaaacttttgtacaagtgtctttgtaagggcgaggtctgctctgacatctctctgagatctgagatctgatacctgcaggataacttcgtataatgtatgctatacgaagttataactttgagttcagtttgggaactatttaaacctgcttgctggtcacattattgtcagtacctaccatgaagaattcaatattattttacattgtcaaccattacatggatcccatgttgtgcatagcctctatgtcatcctttggtctcttatgtctgtagcgtgctagtagtattcaagttgtagcactgctgtgaaacagtacgttcaagtagtgtgcagcagtacgttcagttagtggactggggcagcctcgccttcagcaaaggttaggtacatgagccagttgctcactcttgctttctacgaatcccataggctactttgccccctaaccgtgacgaccccctgtgtttgagaagtttgagtctttttacgttaccgtgaccaagcgagcagagtagaaactcttgaagttgtgtatgtaagaatacaaattgagaacacaaggttacctacctttatagttggtaaacagcaagcaataccagagatttt

SEQ ID NO: 183 - DNA, 3874 bp, synthetic construct
  source 1..3874: mol_type = other DNA
agatgtagccggcgctgtagagttttggacggataggttgggtttcagtcgagacttcgttgaagatgactttgcaggcgtcgtgcgtgatgatgtgaccctgtttatctcggccgttcaagatcaagttgtccctgacaatacacttgcatgggtctgggtacgcggattagatgaattgtacgcggaatggtctgaagttgtatccactaactttcgtgacgcttcaggtcctgctatgactgagattggtgaacaaccctgggggcgtgagttcgcactccgagatccagctggaaattgtgttcatttcgtagctgaggaacaggattaatggtgttcaccactgttgcttcccctttgttggagcgtccgtcgttctgatggcgctctgagcccaaaatatcccttcttcgcccgagagcaagcctcggagtgtgcttgcaatctacttttcctactaaagttatcttcttgtggcttctgaatttgaatagaacgtgttcagacttgttagctaaatttgttgatgcgagatacttgacagaatcccgttgatgaactcatctgtgtgaccaccgcctggtgatggaatctcgcgcggaagccgtggtgttactgactctcaagcaattcagtagataaatttgtataacatcattgcaaggggtgctagcaatcaattgtccaataccaaacggcggcaagtgcaaaggggcgatagagagtttctgcgaggaagggaaggaatccgtatgcctgaaaacttttgtacaagtgtctttgtaagggcgaggtctgctctgacatctctctgagatctgagatctgatacctgcaggataacttcgtataatgtatgctatacgaagttgtcaaacacgtagaacacagggatcgccatttgtccgaaatgcaatctttgctctcgaagcttgaagcttgaatagcttgaagcatgagtgcatgaggggctgctatgatcttccaaccaaacttgcttgggcattgcactttggctggatagctatcatttagctgacccccaaagagactgccaatgatatgatatttgtgtaggtgcacgagtggatgagtggcgcgactacctgtcacaagatagatgctcgatgcacttcatgtgaagtggctagtggatgtccggagactggagtacagtaaagagtttggagttgggaacagcgcgaatgaaagaggctcagagagaggtaggtttgatgtgacgtcaagcgggctagtcagttagcaagggagtatggaatgcagcgcgcaacgcgcagcgcggagcccagtgcgcctgcgctcaggtactcatactcagtactcagtactcaggcgccatgccggagcttacatgcaatcaattaaccctgacgtctggcgcggcctgacgcctgaggcctgaggcctgacgcggccaagctccaagcgcaaccccaggctggcttgcgctggcgggcgcgagacgcagcagggggcaagtgtcgcagagtcgccgatcggatctgtggaacagcacaggaggcccgtgcggtcggctgcgcagtgcggtggagaagctggaagctggaagctggaaggtggaacctggaacttggaacttggaaaggaagaagagcgggaaggcgatgcacgatgcacgatgcacgatggggttggattgcgtacgagtagccgcacagcgcacagcgcacaacactcaccccatgcccccacgccccagcccgtgctcgggccatgagctgctggcaaccccccgaggcagccggcctttaactcaagtagcattcgccgccggtcggttcttcttagcctcccaccaccaccacttgcccgtgcttggacgctaattacaataaaatggttaccgcactcattgccccttcggttcttgcctcggacctgggcaacttgactgccgaatgcaagcgaatgctggataatggggcggattggctccacatgggtgcgtcatcgatttgtattgcttgagcttgcttttaagccatttctggcgagcgctgctaaccctgctatcactttggcaaattggaacagatgttatggatgggtatgttggacgatagcagatgaggtgttttctgtggagttggagtaggatgtgtgctaatcatttgcgttgtacagtcacttcgtacccaacatcgtgcttggtgcaccaattttggcttcggtctccaaagaccttcctggtgccgagctggattgccacatgatggtatcttctcctgaaaaggtacgttacagaaatattgaccggcacatatgtgtataagggaaaaagctgacctgtttttgcggtttagtggatcaaagatgtggctgctgcaggaggcaaatcctatacgttccatctcgaagccactagtacgtatattcgatttactttgtgtcagccgacacaatctaaccttctttcttttctgctttttcagatgatccgctggacatcgtacgtcagatcaaagcggctggcatgcgtgcatcagttgcgattaaccctggtacgccatcggccgagatctcggatgcactggcccaatcactagatatgattctcgtcatgaccgtttggcctggtgctggtggtcaaaagtttattgcagagtgcatgcccaaagtgactgagttgcgtcggcgattccccgatttgaacattgaagttgatggtggtgtgggacctaaaacaattgacaagtgtgccaaagctggtgcaaatgtcattgtagcgggtacagcaatctttggtgcggatcgtcctagggatgtaatccatttccttcgttctcaagtcaacgaggctcaagagaagctgagggaagaatgggctaagagcgggtaacacggatcaacaaaaatgtgcgccagctttgttgtgtgcccttttcctctagcggatcctatccacatttcgtgaatgaaccgattaagctctgacgagatttccttgttttctgtagatacctcttgtagaggtgtcaaagttatgttgtgatcgagagagttacctgcaaggtattatgcaagcggcttgatgaggacactcaactacgtgtgagtaggagtgcgttgctcagcagttgacgcgtgagccgcttgagcagcttgataaaggtcctaatcgtcttccagctgttggcagacgacaatgtgctgtagtagtaggataggcccgtaaaagtgtagaagcaataggttgagactgactgtaatgggtacttgcgttcaaagactgaaagtccaaaggattgctcaaaggcccctgaggtctgagcctctgagcgcgctcttcgtcaaaattcgccggggccatcggtcatcctctcgagggcagcatcttcctgcttgaagactgagtccgtctcaggcttgctggtcacattattgtcagtacctaccatgaagaattcaatattattttacattgtcaaccattacatggatcccatgttgtgcatagcctctatgtcatcctttggtcttttatgtctgtagcgtgctagtagtattcaagttgtagcactgctgtgaaacagtacgttcaagtagtgtgcagcagtacgttcagttagtggactggggcagcctcgccttcagcaaaggttaggtacatgagccagttgctcactcttgctttctacgaatcccataggctactttgccccctaaccgtgacgaccccctgtgtttgagaagtttgagtctttttacgttaccgtgaccaagcgagcagagtagaaactcttgaagttgtgtatgtaagaatacaaattgagaacacaaggttacctacctttatagttggtaaacagcaagcaataccagagatttt

SEQ ID NO: 184 - DNA, 3922 bp, synthetic construct
  source 1..3922: mol_type = other DNA
agatgtagccggcgctgtagagttttggacggataggttgggtttcagtcgagacttcgttgaagatgactttgcaggcgtcgtgcgtgatgatgtgaccctgtttatctcggccgttcaagatcaagttgtccctgacaatacacttgcatgggtctgggtacgcggattagatgaattgtacgcggaatggtctgaagttgtatccactaactttcgtgacgcttcaggtcctgctatgactgagattggtgaacaaccctgggggcgtgagttcgcactccgagatccagctggaaattgtgttcatttcgtagctgaggaacaggattaatggtgttcaccactgttgcttcccctttgttggagcgtccgtcgttctgatggcgctctgagcccaaaatatcccttcttcgcccgagagcaagcctcggagtgtgcttgcaatctacttttcctactaaagttatcttcttgtggcttctgaatttgaatagaacgtgttcagacttgttagctaaatttgttgatgcgagatacttgacagaatcccgttgatgaactcatctgtgtgaccaccgcctggtgatggaatctcgcgcggaagccgtggtgttactgactctcaagcaattcagtagataaatttgtataacatcattgcaaggggtgctagcaatcaattgtccaataccaaacggcggcaagtgcaaaggggcgatagagagtttctgcgaggaagggaaggaatccgtatgcctgaaaacttttgtacaagtgtctttgtaagggcgaggtctgctctgacatctctctgagatctgagatctgatacctgcaggataacttcgtataatgtatgctatacgaagttgtcaaacacgtagaacacagggatcgccatttgtccgaaatgcaatctttgctctcgaagcttgaagcttgaatagcttgaagcatgagtgcatgaggggctgctatgatcttccaaccaaacttgcttgggcattgcactttggctggatagctatcatttagctgacccccaaagagactgccaatgatatgatatttgtgtaggtgcacgagtggatgagtggcgcgactacctgtcacaagatagatgctcgatgcacttcatgtgaagtggctagtggatgtccggagactggagtacagtaaagagtttggagttgggaacagcgcgaatgaaagaggctcagagagaggtaggtttgatgtgacgtcaagcgggctagtcagttagcaagggagtatggaatgcagcgcgcaacgcgcagcgcggagcccagtgcgcctgcgctcaggtactcatactcagtactcagtactcaggcgccatgccggagcttacatgcaatcaattaaccctgacgtctggcgcggcctgacgcctgaggcctgaggcctgacgcggccaagctccaagcgcaaccccaggctggcttgcgctggcgggcgcgagacgcagcagggggcaagtgtcgcagagtcgccgatcggatctgtggaacagcacaggaggcccgtgcggtcggctgcgcagtgcggtggagaagctggaagctggaagctggaaggtggaacctggaacttggaacttggaaaggaagaagagcgggaaggcgatgcacgatgcacgatgcacgatggggttggattgcgtacgagtagccgcacagcgcacagcgcacaacactcaccccatgcccccacgccccagcccgtgctcgggccatgagctgctggcaaccccccgaggcagccggcctttaactcaagtagcattcgccgccggtcggttcttcttagcctcccaccaccaccacttgcccgtgcttggacgctaattacaataaaatgccagtctgtctgatcgctccttccattttggcctcggacatgggagcactcacagccgagtgtaagcgaatgcttgactgtggtgctgattggctgcacatgggtacgttgccgtttcttgtgcgtacagaggtattgattgtttttatttatttattgacattgttatactacttctattctggcttgggatgcttgtgcagacgtcatggacgggtaagttctagtttgagcggaaagggtggctggggagaagggcacgagaataccgcctgcaaattgagtactgactgagtttggattctttttttgtttgccagccattttgtcccgaacattgttcttggggcccctatccttgcttcaatctctaaatctttacccgatgccgaactggattgccatatgatggtatctgctcctgaaaaggtacgtgtattaggtcccaaccaaaacttttgctgatggattcctgacatgcctctctctctccccccctccctctgcatacaccagtggatcaaagatatcgctgctgcaggcggcaagtcttacacttttcatctggaagcaacaagtacgatgacttttccttcctttcgagactcaagcagtgaactaaccatttgattggcacagatgaccccttggacactgtacgacagatcaaagcatccggtatgcgcgcagctgttgctattaacccaggaaccccctcagccgaaatttctgatgaactcgctagccaattggacatgatcctcgtaatgactgtctggccgggagctggtggacaaaagtttattggggaatgtatgcctaaagtaaccgaactacgacgtcgattccccgatttgaatattgaagtcgatggaggagttggacctaaaacgattgagaaatgtgccaaagctggtgccaatgttattgtggctggtactgctatcttccatgctgaacgtccaagggacgtaattcatttcctacgaacgcaagtgaatgaagctcaggctcaactgaaagaggaatgggccaagagcggttgataaacggatcaacaaaaatgtgcgccagctttgttgtgtgcccttttcctctagcggatcctatccacatttcgtgaatgaaccgattaagctctgacgagatttccttgttttctgtagatacctcttgtagaggtgtcaaagttatgttgtgatcgagagagttacctgcaaggtattatgcaagcggcttgatgaggacactcaactacgtgtgagtaggagtgcgttgctcagcagttgacgcgtgagccgcttgagcagcttgataaaggtcctaatcgtcttccagctgttggcagacgacaatgtgctgtagtagtaggataggcccgtaaaagtgtagaagcaataggttgagactgactgtaatgggtacttgcgttcaaagactgaaagtccaaaggattgctcaaaggcccctgaggtctgagcctctgagcgcgctcttcgtcaaaattcgccggggccatcggtcatcctctcgagggcagcatcttcctgcttgaagactgagtccgtctcaggcttgctggtcacattattgtcagtacctaccatgaagaattcaatattattttacattgtcaaccattacatggatcccatgttgtgcatagcctctatgtcatcctttggtcttttatgtctgtagcgtgctagtagtattcaagttgtagcactgctgtgaaacagtacgttcaagtagtgtgcagcagtacgttcagttagtggactggggcagcctcgccttcagcaaaggttaggtacatgagccagttgctcactcttgctttctacgaatcccataggctactttgccccctaaccgtgacgaccccctgtgtttgagaagtttgagtctttttacgttaccgtgaccaagcgagcagagtagaaactcttgaagttgtgtatgtaagaatacaaattgagaacacaaggttacctacctttatagttggtaaacagcaagcaataccagagatttt

SEQ ID NO: 185 - DNA, 1536 bp, synthetic construct
  source 1..1536: mol_type = other DNA
gcgaggagtagttactaggtagcggtatagcaattccgcccataatgcataaccgttctccctaccaaaacaaaacaatggctacgtggccggcgtgcgtggccgacatggtgcgggtgcggggggcggggtacgagtgtggggagttcactagttcgctggctagctgactagctgaccggcgtgtggttgtggcagtacgcagtgggaaagattaaatatgaaatattgaatatcaaaatgacgtttggggtggcacgtgcgcgcgccaacaacaacaagagcagccaccaagccaaagcaccaagcaccaaccccgcacaccattttgttacacccgcggcagaaatggcgtcagccagcagtcactattactcaatattcaataggggttccacttgactcacttcctcatgtatatatatatccatctaatcttcccaatacataaccccccccctccgaagcgacacctccttctactgcactactgacagtcaaacaccttataacttcgtataatgtatgctatacgaagttatcctgcaggagctcagaccttgcatgttagccttgaccttgcctctatgaccactaattcgcacaagattgcacgttaccattgtcatcttgccatgtatccaatgtttcctgtttgccatagtacgtagtagatacatcgatcatcgatgcagatgacgcagatggcattggttcgctttgccctatgcatccatcatgcatcatgcatcatgcatcatgcgtcactatccatattaatcattgccctctgtactaggccatgacacctgcagacccttccccagggatgcttcttgtaatagccaatatactacacaactttaccgattacgatcgagatcgatctcactatagtttgtcgaacttcgatgcacatcgagggtgcggaaaaaagctgacggaagcggaagtgggtgaattggttaatttagttagattggcagggttgttcccaagattcaacgcaagctgagaaagaaaacagaaacacgaggcataaggccagtcagaaaatgcattacgaggggagttgaagtgactgtgggccagtgcctgggtcgtcatgtgcaaattttttcttcggttagactgccgcagcatgcagcaactctgccggccctatataactagtgcttcatcttcttgtcattcttgtctctttaccaacacaccggtactctttcaccatggcaaagttgacgagcgccgtgccggtgctaaccgcgagagatgtagccggcgctgtagagttttggacggataggttgggtttcagtcgagacttcgttgaagatgactttgcaggcgtcgtgcgtgatgatgtgaccctgtttatctcggccgttcaagatcaagttgtccctgacaatacacttgcatgggtctgggtacgcggattagatgaattgtacgcggaatggtctgaagttgtatccactaactttcgtgacgcttcaggtcctgctatgactgagattggtgaacaaccctggg

SEQ ID NO: 186 - DNA, 4533 bp, synthetic construct; identical to SEQ ID NO: 77
  source 1..4533: mol_type = other DNA

SEQ ID NO: 187 - DNA, 3968 bp, synthetic construct
  source 1..3968: mol_type = other DNA
cttaaacacggcaagggtagcgttgcaaacgacgtaaccgacgaaatggtccgtctgaattggctaactgagttcatgccactccccaccatcaagcacttcatccgtacacctgacgatgcgtggctgttgactacggccatccccggtaagaccgcttttcaggtcctcgaggaataccctgactctggcgagaacatcgtggatgccttggctgtgtttttgcgccgccttcactctattccggtctgcaactgccctttcaacagcgaccgtgtttttaggcttgcccaggcacaatcacgcatgaacaatggtctagtcgacgctagtgatttcgatgacgagcgcaacggctggccggtggaacaagtgtggaaagagatgcataagctcctgcccttttccccagactctgtcgtgacgcatggtgatttctcgcttgacaacctcatctttgacgagggcaagctcattggctgcattgacgtcggccgggttggcatcgccgatcgctaccaagatcttgcgatcctctggaattgtctgggcgagttctcccctagcctccagaagcgtctgttccagaaatatgggatcgataacccagacatgaacaagctccagttccatttgatgctggatgaatttttctaatggtgttcaccactgttgcttcccctttgttggagcgtccgtcgttctgatggcgctctgagcccaaaatatcccttcttcgcccgagagcaagcctcggagtgtgcttgcaatctacttttcctactaaagttatcttcttgtggcttctgaatttgaatagaacgtgttcagacttgttagctaaatttgttgatgcgagatacttgacagaatcccgttgatgaactcatctgtgtgaccaccgcctggtgatggaatctcgcgcggaagccgtggtgttactgactctcaagcaattcagtagataaatttgtataacatcattgcaaggggtgctagcaatcaattgtccaataccaaacggcggcaagtgcaaaggggcgatagagagtttctgcgaggaagggaaggaatccgtatgcctgaaaacttttgtacaagtgtctttgtaagggcgaggtctgctctgacatctctctgagatctgagatctgatacctgcaggataacttcgtataatgtatgctatacgaagttatgtcacagtatcggcatctctgtctcgacgacagtgagtatagtcaactatgctatctagtagccaaagtaagtctacattccgggctttgcaggggttagctatttcattagacaatacttacaaccttcgaagggcttccccagaattcaattctatattgattcaatatccacccatcggacccgctctccgtaccccctgttcgcttcgccactacaaccatgtcaagacctgagaatcgtagcaaattgccccactacggcccgagtgctgtcggctggttaaagtagaatgacttgggtagccagatcgagacgcctgacattgatacgcagacagcgcagtcagtttcaaactgacaactgacgcgtactggattgacaggactccttggccggtgccattcgaatcgcttgtagacctcttgccagcatcttgccagagaagcttgaaggctggatcgctcagcctgagctcacacttagtagctccactagtcactcaggtgctcagcctctcctcagcgcctcaagctcaagcctcagggcctcagctgcatcgagctctggtgccagtgccagtgccagtgccagtgccagtgccagtgccagtgccagtgaagagagtggtatgagccaagctatacccaaaagcaaatgatggttattgccagcttccatgcacccctggggcgaaggacaacgaacaacagacagagtttgaattattcactggcctagtactaccaatttaaatttggtggttcagcgcaggaacggcgcgagtgagcgtaagggcaaactccgcatggggcgtgacgtcagtgtccctctggctgaggcactccagcaggctctggtcaacgcatcaacgtgtgtgtgtgtctaccaagcacattgtgcgctcgctgtccgtgcgccgaaatcgcaccagtcagaacgtctataaaacccctcttgcttggagggttaccgggccgtcttttcccaacgctccggctcactcactactctacacaacaaatggccgaattttccgctgatttgtgcctcttcgaccttgacggaactatcgtctcgactaccgttgcggcagagaaggcgtggaccaagctctgctacgaatacggtgtggatccgtcggaactgttcaagcattctcacggtgcccgcacccaggaagttctccgtcgcttctttccgaaactggatgataccgataacaaaggagtgcttgcacttgagaaggatattgctcattcctatctcgacaccgtgtcccttatccctggagccgaaaacctccttctctccctggacgtcgatacagaaactcagaagaaactgccagaacgaaaatgggccattgtcacctccggcagcccctacctggccttctcctggttcgaaactattcttaaaaatgttggcaagcctaaagtctttatcacgggatttgacgtcaagaacggcaaacccgacccagaaggttactctcgtgcgcgagatttgttgcgacaggatctgcagttgaccggaaaacaggatttgaaatatgtcgtcttcgaagacgctcccgttggtatcaaagccggcaaggcgatgggcgccatcacggtcggaatcacttccagctacgacaagtctgtcttgtttgatgcgggtgctgactacgtggtttgcgatttgacacaggtttccgttgtcaaaaataatgagaacggcattgtgattcaagtcaataacccgttgacacgtgcttaacatggtctgagccgcccacgattccttccttcatgagcgtatgacgacccttttacttagcatgtgcctctaaagaatacgttttgcatacccacatattcgtaaccctgtcctctatagcttctacaggtcatagtcactggctgccagtataaacgtgtcaatatctaatcctcataagatgcctcgctctgtcgtccacaataaaattcagtaacgcaaggactgcgcgactgagtgattgccgatgatatgagaaaactaatttcaagccatttgaacttcaataaatgcttccgctaacatcacggatcatcgatcatcaaccagcctccattaataggcctgccaccactcgcgcaatcatgaatctgatcatacctggctagcgattctcataacaccagaattacctgcccattaaagaaaccctattctgcctgtaacccggcaccagccggtccgaattcacgacagactaaggctctcgcgcagcttgaagactgagtccgtctcagattgttgcatcgtctcatcagatcgtccttcattgtagtgataattggtgcaaccttgtattagactgtatagcagaatccctcgctataaaaagtattatgcatacgcagttccaagcaggaattagtatggtagtgggacttggctgaagggctgacgacatggcgagaaaaacgtatcaattcggaacacactgtgcaatgtcgatcacgttttcggtggttcacggtaggcttcctagtccatgggaaagtggtaacatctatcccttgagcgcttgagcttaatgttaccttgtgcaaaagtcatttgaagcttcacttgaagcttgaagctttgaagttttgaagcttgaagcgcaaacagcagcggtacatgtatactggcgtaacctgcctacagtggtgcatcagtacgtcaagcgggtagcccgaaatctcattaaggtcatttgccctctaagcttagtacctagtgatctgttc

SEQ ID NO: 188 - protein, 246 aa, Saccharomyces cerevisiae
MAEFSADLCLFDLDGTIVSTTVAAEKAWTKLCYEYGVDPSELFKHSHGARTQEVLRRFFPKLDDTDNKGVLALEKDIAHSYLDTVSLIPGAENLLLSLDVDTETQKKLPERKWAIVTSGSPYLAFSWFETILKNVGKPKVFITGFDVKNGKPDPEGYSRARDLLRQDLQLTGKQDLKYVVFEDAPVGIKAGKAMGAITVGITSSYDKSVLFDAGADYVVCDLTQVSVVKNNENGIVIQVNNPLTRA

SEQ ID NO: 189 - protein, 246 aa, Saccharomyces cerevisiae
MPQFSVDLCLFDLDGTIVSTTTAAESAWKKLCRQHGVDPVELFKHSHGARSQEMMKKFFPKLDNTDNKGVLALEKDIAHSYLDTVSLIPGAENLLLSLDVDTETQKKLPERKWAIVTSGSPYLAFSWFETILKNVGKPKVFITGFDVKNGKPDPEGYSRARDLLRQDLQLTGKQDLKYVVFEDAPVGIKAGKAMGAITVGITSSYDKSVLFDAGADYVVCDLTQVSVVKNNENGIVIQVNNPLTRD

SEQ ID NO: 190 - protein, 363 aa, Scheffersomyces stipitis
  source 1..363: note = formerly Pichia stipitis
MTANPSLVLNKIDDISFETYDAPEISEPTDVLVQVKKTGICGSDIHFYAHGRIGNFVLTKPMVLGHESAGTVVQVGKGVTSLKVGDNVAIEPGIPCRFCDECKSGHYNLCPHMAFAATPNSKEGEPNPPGTLCKYFKSPEDFLVKLPDHVSLELGALVEPLSVGVHASKLGSVAFGDYVAVFGAGPVGLLAAAVAKTFGAKGVIVVARSDRKLKMAKDIGAATHTFNSKTGGSEELIKAFGGNVPNVVLECTGAEPCIKLGVDAIAPGGRFVQVGNAAGPVSFPITVFAMKELTLFGSFRYGFNDYKTAVGIFDTNYQNGRENAPIDFEQLITHRYKFKDAIEAYDLVRAGKGAVKCLIDGPE

SEQ ID NO: 191 - protein, 256 aa, unidentified
  source 1..256: note = Rhodobacteraceae bacterium
MYAELFRLDGRTAFVTGGSRGIGLACAEALGEAGATVALSSRSRDEGEAAAAALQGKGIRAIYLPADLSTEKAAQEAVRRAADELGGLDILVNNAGIARHCDSLALPPETWDEVIATNLTGLFWCCRAALERMVAAGRGSIVNVGSISGFISNLPQNQVAYNASKASVHMLTKSLAGEFAQQNIRINAVAPGYIETAMTRGGLDDPEWSKIWLGMTPMRRSGTPSEVAAAVLFLASDAASYITGSVLTIDGGYTIH

SEQ ID NO: 192 - protein, 352 aa, Bemisia argentifolii
MASDNLSAVLYKQNDLRLEQRPIPEPKEDEVLLQMAYVGICGSDVHYYEHGRIADFIVKDPMVIGHEASGTVVKVGKNVKHLKKGDRVAVEPGVPCRRCQFCKEGKYNLCPDLTFCATPPDDGNLARYYVHAADFCHKLPDNVSLEEGALLEPLSVGVHACRRAGVQLGTTVLVIGAGPIGLVSVLAAKAYGAFVVCTARSPRRLEVAKNCGADVTLVVDPAKEEESSIIERIRSAIGDLPNVTIDCSGNEKCITIGINITRTGGTLMLVGMGSQMVTVPLVNACAREIDIKSVFRYCNDYPIALEMVASGRCNVKQLVTHSFKLEQTVDAFEAARKKADNTIKVMISCRQG

SEQ ID NO: 193 - protein, 361 aa, Beauveria bassiana
MASRLTPIVRTATRRCAAARMCQSLVALRALHDGPPRRNKPGSHSQTDSDIEIPFPPEDELPSDPVRRAGGQYVKPTLQTFSLDKKVGLVTGGARGLGLVIAQGMVYSGADVALVDMNSKLTQKLGGSFTSADIPTEEEAEKQTKNLVKAFMRENPNAARVPKVTAHFSDVSDPASVDACIAEVIEQHGKIDNLVTSAGFTENYEAVNYPIDRLRKLWAVNIDGTYLFATSVARHLMERKAPGSMVLIGSMSGSIVNVPQPQTPYNVSKAGVRHLASSLAVEWADANIRVNCLSPGYMMTALTAKILDENPELKKKWVSLIPMGKMGDPGDLMGPVIFLLSENSKYVNGIDLRVDGGYTLT

SEQ ID NO: 194 - protein, 278 aa, Pichia stipitis
MDYSYANVVPNFRLDGRLAIITGGSGGLAAVISRALLAQGADVALIDMNLERTKSAAKEVLGWGEETLKGEHASAIGQVSAWSCNIGDAEAVDATFSSINEHHGKIADLLINTAGYCENFPAETYPATNAESIMKVNGLGSFYVSQSFARPLIQNNLRGSIILIGSMSGTIVNDPQPQCMYNMSKAGVIHLVRSLACEWAKYNIRVNTLSPGYILTPLTRNVISGHTEMKEAWESKIPMKRMAEPKEFVGSILYLASETASSYTTGHNLVVDGGYECW

SEQ ID NO: 195 - protein, 281 aa, Candida albicans
MDSAYWSYDNIVPSFRLDGKLVILTGGSGGLAAVVSRALLAKGADVALVDMNLERTQQAARDVLQWGEEQMKGKYESPIGQVSAWSCNIGDAEAVDLTFKAINEHHGKISSVLVNTAGYAENFPAEEYPAKNAENLMKVNGLGSFYVSQAFARPLIQNNMTGSIILIGSMSGTIVNDPQPQCMYNMSKAGVIHLARSLACEWAKYNIRVNTLSPGYILTPLTRNVISGHTEMKTEWESKIPMKRMAEPKEFVGSILYLASESASSYTTGHNLVVDGGYECW

SEQ ID NO: 196 - protein, 361 aa, Kwoniella heveanensis
MSVFRSTLSTARALSARPTFCAPSRAAGAGSIRAYSTPTKVVRKDEKGDPLEEHRVEVEPKLAAIDETITFEHPKKWGKHPGHDMTKGDFGRHTKRTLASFSMDGKVCLVTGAARGLGNMMARTFVESGANAIVLVDLKKEDAERAAEDLVKWFVENGEAEEGEIQALGLGCDVSDEASVASVFATVKEKFGRLDAVVTAAGIVENYVAHEYPTQKIKKLLDINIMGTWYCALEAAKLMPEGGSITLVGSMSGSIVNVPQPQTPYNFSKAGVRHMARSLAVEWATKGIRVNCLAPGYTLTNLTKVILDANPVLRDEWLHRIPMGRLADPSDLKGAVIYLASDSSKYTTGAEIVVDGGYTCL

SEQ ID NO: 197 - protein, 282 aa, Candida maltosa
MDASSYWSYENIVPSFRLDGKLVILTGGSGGLAAVVSRALLAKGADIALIDMNIERTEQAARDVLQWGEEQMKGKYESPIGQVSAWSCNIGDAESVELTFKAVNEHHGKIASVLINTAGYAENFPAEEYPAKNAENIMKVNGLGSFYVSQSFARPLIENNLTGSIILIGSMSGTIVNDPQPQCMYNMSKAGVIHLARSLACEWAKFSIRVNTLSPGYILTPLTRNVISGHTEMKNEWESKIPMKRMAEPKEFVGSILYLASDSASSYTTGHNLVVDGGYECW

SEQ ID NO: 198 - protein, 273 aa, Moniliella pollinis
MSYDANGNLKYSDAKFVFLTDFDGTITLLDSNDHMVDNYGMGYTERRKINEAIVSEQISYRDGFRKMVESVHEPFSEMEALVRRDVTLDPGFKDFHAFAKANDIPIIVVSSGMTPVIRSIFANLIGDEEASKIDVISNEVKFTDPEGKGKTWELVYRHPDNHYGHDKSLSILPYRDLKTRPTLFFAGDGISDMSAATHADVLFVKDKPDNDLGRYCDRKGYPYKLFKDWTEIKAAVQSIIEGQAQPKEIMTDLGKTTGKTPEQLEQEFKKPIA

SEQ ID NO: 199 - protein, 273 aa, Moniliella pollinis
MSYDDAGQLKYSDAKFVFLTDFDGTITLLDSNDHMVDNYGMGYTERRKINEAIIHEQISYRDGFRKMVESVHEPFSEMEALVRRDVTLDPGFKEFHQFAKQHHIPIIVVSSGMTPIIRSIFANLVGDEEASKIDVISNDVKFTDPEGKGKTWELVYRHPDNHYGHDKSLSILPYRGLVNRPTLFFAGDGISDMSAATHADVLFVKDKPDNDLGRYCDRKGYPYKLFKDWTQIKAAVESIIDENAEPQEIMTDLGKTTGKTPEQLEEEAQKHAA

SEQ ID NO: 200 - protein, 253 aa, Moniliella pollinis
MVTEIEVDAVLFDMDGTLIDSTPAVNQTWAEYIERYNLDFDYVMSHCHGCRTVESLKNIVGLPDDQLEQGVVEFEGRISELAEEAARTNGPGQIVALPGAKELLAQLNKGSEQPGRRPGWAIVTSATKAYAYVGFRASGVNGTEFPRAFVTGDNVSKGKPDPEPYLLGAKTLQPPADPKRCLVIEDAPPGIRSGVAAGAKTLGLTTTHAENLMWQAGANWVVPDLSSVSARWEGEGADARLFIRIENSGQRPE

SEQ ID NO: 201 - protein, 241 aa, Saccharomyces cerevisiae
MVKAVIFTDFDGTVTLEDSNDYLTDTLGFGKEKRLKVFEGVLDDTKSFRQGFMEMLESIHTPFPECIKILEKKIRLDPGFKDTFEWAQENDVPVIVVSSGMKPIIKVLLTRLVGQESIHKIDIVSNEVEIDAHDQWKIIYKDESPFGHDKSRSIDAYKKKFESTLKAGEQRPVYFYCGDGVSDLSAAKECDLLFAKRGKDLVTYCKKQNVPFHEFDTFKDILASMKQVLAGEKTVAELMEN

SEQ ID NO: 202 - protein, 237 aa, Lachancea dasiensis
MVNAVIFTDFDGTVTWQDSNDFLTDTKGFGKEERSKVFEGVLDGTKSFRDGFWDMLESVKTPFPECVKLVEENIQLDPGFKDTFEWAQENGVPIVVISSGMRPLIKALLARLVGPEAIEKIDIVSNEVEIDSDGQWRIVYKDDSSFGHDKSKSITAYKKQFEAAGKKPTYFYCGDGVSDLSAAKECDLLFAKRGKDLVTYCKREHVPFHEFDTFEDILSSMKDVLAGKKTVTELMQN

SEQ ID NO: 203 - protein, 240 aa, Tetrapisispora blattae
MVKAVIFSDFDGTITLQDSNDFLVDNKGMGKNDRLKLFEGVLNGTKNFRDIFSDMLGSLNLTQEEGIEFLKENIELDPGFKKTFLWAQENNVPLIVVSSGTVPVIRALLTKMIGSDIEKLDIVSNDLEVNESNHWTVLYRDSTPHGHDKSKTIDDYKSKYESQLVEGEERPVYFYCGDGISDLTAAKECDLLFAKAGKDLITFCKKQNVPYHEFNTWDDILRSMKAVLNGEKTVKELMEN

SEQ ID NO: 204 - protein, 241 aa, Saccharomyces pastorianus
MVKAVIFTDFDGTVTLEDSNDYLTDTLGFGKEERLKVFEGVLDGTKSFRQGFMEMLESIHTPFPECIKILEKKIRLDPGFKDTFEWAQENDVPVVVVSSGMKPIIKVLLTRLVGQHSIHKIDIVSNEVEIEAHDEWKIIYKDESPFGHDKSRSIDAYKKKFESALKPGDERPVYFYCGDGVSDLSAAKECDLLFAKRGKDLVTYCKRQNVPFHEFDTFEDILASMKQVLAGEKTVTELMEN

SEQ ID NO: 205 - protein, 241 aa, Kazachstania africana
MVKAVIFSDFDGTITWQDSNDYLTDTLGFGKEERLKIFEGVLDGTKPFREGFTQMISSIETPLPECLAILKEKIQLDPGFKKTYEWSLEHSVPLIVVSSGMKPIIKALLENMLGEEAIKNLEIVANDVELDANNKMTVTYRDETPFGHDKSKSIDNFKAHYEAQLPEGAEKPTYFYCGDGISDLSAAKECDLLFAKRGKDLVTYCKRQNVPFHEFDTFEDILRSMNQVLDGEKTVSELMEN

SEQ ID NO: 206 - protein, 257 aa, Podospora comata
MGSTLDIALPALKTKPKFIFFTDFDGTITQQDSNDWMTDNLGFGAELRKKGNEDVLFGRRDFRDSFADMLDSIKTPFNECIELLLKNITLDPGFKQFFEWAKENNVPIVILSGGMEPVIRALLAHMLGKEEAETLQIVSNDVAPRPGKSVNEAGGWHIVYHDDSGFGHDKSLEIRPYARLPAEERPVLFYAGDGVSDLSAAKETDLLFAKSGRDLVSYCERENVPFTTFQDFTEILATVKDIVAGKTTVKEAATGRK

SEQ ID NO: 207 - protein, 252 aa, Geotrichum candidum
MSTSTTPAPAVNGTPALKTNPKYIVFTDWDGTVTLQDSNDHMTHNLGFGYEKRIALNDRILDGSISFRDAFQEMLDSIHTPFPECIDYLLKEIQLDPGFPDFYKWAKANNIPIVVVSSGMKPIIHALLVKLVGKTAADDIEIISNDVAIKEDGSWDIVFRDESDFGHDKSRCIRPYTAISDRPTLFYCGDGVSDLSAARETDLLFAKEGKDLITYCKREHIPYTTFASFKDIHSKIQNIVEGKKTVKESQDN

SEQ ID NO: 208 - protein, 238 aa, Ogataea haglerorum
MSPPAIVFTDWDGTVTLQDSNDVLTDNLGFGYEKRKVLNDRMLNETLSFREGFDEMLRSIPANGHSFQECVDYLLQHIKLDPGFKEFYYWCHENGIPIYVISSGMSPIIEALLKKLLGQQVMNHVTIISNGVEINGNDWHIVYRDDTPFGHDKAASIKQCLMNYDLSKKPYLFYCGDGVSDLSAAKSCDLLFARRGKDLVTFCIKQKIHFTQFDTFRDILSDIQKIVSGEKKLEDCFE

SEQ ID NO: 209 - protein, 243 aa, Debaryomyces fabryi
MSGPPAIVFTDWDGTVTLQDSNDYLTENLGFGKPRRLEINDEILNERVSFQEGFTEMLKSIPTPFPECIEYLLKHIQLDPGFKDFYHWCFERNIPVIVISSGMKPIIHALLKNLVGDEAIKNIEIISNEVDVKADGSWNIVYKDPETSFGHDKSKSIREYLERNGYSSQNVPLLFYCGDGVSDLSAAKETNLLFAKHGKDLITYCNRENIPYTEFNSFEDILSKVTKIVEAKGKNINEFLENH

SEQ ID NO: 210 - protein, 267 aa, Monilinia fructicola
MGSTTTTLPAMKTSPKYVFFTDFDGTITTRDSNDFMTDNLGFGQELRKQGNRDVLDGRKTFRDSFQSMMDSIKTPYSKCIETLIENIKLDPGFKEFYEWARENNIPVVILSGGMEPIIRALLEHLLGKKEAAEIQIVSNQVEVRKGFKSLDEEGGWNIVYHDESHFGHDKSREIRPYAELPDDQRPTMFYAGDGVSDLSAAKETDLLFAKKGHDLITYCVREKVPFTIFEDWTSILSTVQDVVAGKTTVKEVYAAGIKDFEQGADKA

SEQ ID NO: 211 - protein, 254 aa, Nadsonia fulvescens
  source 1..254: note = Nadsonia fulvescens var. elongata DSM 6958
MGDSSFLSLPAMQTSPQSIVFTDWDGTVTLEDSNDFLTDNLGYGVERRKWLNQQVLEGKWTFRDSFMDMLQSINTPLPECIAYLKQHVKLDPGFLAFYTWCKSHNIPVIIVSSGMTPIIRALLEDLVGMDAALDIQIVSNDVAIDDAGKWKIVYRDDSPFGHDKSLAIKPYANLDPAVRPTLFYCGDGVSDLSAARETDLLFAKKGRDLVTYCERENIAYNVFDSFADIHKRVKAIVEDNSLTLEQAVAQKEIL

SEQ ID NO: 212 - protein, 211 aa, Actinomadura macrotermitis
MLLPCDGVLFDVDGTLVDSTPLIERAARVWAPEYGIDPDAYLARAHGRRTSDSIADFLPAGQVRAATERLDALEAAEVAGVTALPGVVDLLSSLRGLPWAVVTSMDPGQLTARAGAAGVPLPKVAVTARDVAAGKPDPAGYLLAARRLGLDPARCVVVEDAPAGVAAGRAAGATVVALTTSHSRADLAEADVIVPDLTAVTAEPGGLRVRA

SEQ ID NO: 213 - protein, 216 aa, Escherichia coli
MRCKGFLFDLDGTLVDSLPAVERAWSNWARRHGLAPEEVLAFIHGKQAITSLRHFMAGKSEADIAAEFTRLEHIEATETEGITALPGAIALLSHLNKAGIPWAIVTSGSMPVARARHKIAGLPAPEVFVTAERVKRGKPEPDAYLLGAQLLGLAPQECVVVEDAPAGVLSGLAAGCHVIAVNAPADTPRLNEVDLVLHSLEQITVTKQPNGDVIIQ

SEQ ID NO: 214 - protein, 231 aa, Wickerhamomyces ciferrii
MSKSITLDADIIEFDLDGTLVYTTSVVEKLWSELAIQHGVDPHTVLNDSHGARTSETFAKYFPMIDNTDNKAVEKFEKDIPDNYGHLVKIIPGTIELLNGIDKDRWCIVTSGSNYIANSWFNGILKDVQKPKVFITAELVTNGKPDPEGYLKGDKILSESLGITSEHKKIVFEDAPMGVKAGVASGAIVIGVNSGNNAKLLYESGASYVVKDLTDIKVLDANKVSLEVRYD

SEQ ID NO: 215 - protein, 249 aa, Candida maltosa
MSTSLPPAIVFSDWDGTITLQDSNDYLTDNIGMGYDNRMVINDKILEGTESFRDGFREMLESITKPFDECIEILLKNVTLDPGFVKYYEFCQSKNIPIIVISSGMKPIIRALLEKLIGPEGIKNIEIISNDVRVDGDNWEILFKDPESSFGHDKAKSIKDYLDAHGYAGDADTKRPLLFYNGDGVSDLSAAKETDLLFAKHGKDLIKYCIREKIPYTEFNDFEDILSKMKKIFDGEKEIKDFVENPTVV

SEQ ID NO: 216 - protein, 188 aa, Paenibacillus sp.
MKKPIIAVDMDDTICHLVRRAIYHNNINFPTHPLRYEDMTHWDTSHLRHPESTHDVFYGRPGLFEELELYDEYVVDEMQKLNEAYDVIIVTAADPKTVVEKWNWLQRHMPFITAEQFITCKRKNLINFDLLIDDGAHNLIPAWKAGKKVICIPHPWNGSEREQYPFPLMSSWKGAKAYIDDLFETASG

SEQ ID NO: 217 - protein, 214 aa, Escherichia coli
MAMIFNAKGFLFDMDGTLVDSTAVVESVWRDFCAEYGLDTQAVIAYAHGRQTIDTLTHFIGAGEKTNKIAASLEEVEINTTEGVTEVKGAAALLSKLPPDSWALVTSAGRMLAENRMKAANLPLPIVMVCAEDVMTGKPSPEGYIKAALALGLEPGECVVFEDASAGIKAGLASGASVIAVQPDALGSSEAHAVSELSDIMVKISGERFNIICG

SEQ ID NO: 218 - protein, 219 aa, Mycolicibacterium smegmatis
MTSHKTFPIAGILFDSDGVLVDSHEAAATAWNHWARTWAPGFDFHRDAQHGRRLSDVVAELVGDGDSALATKVLTELEIEMATEVPAMAGAVDLLSSSPADRWAVVTSGAREMAAARLLSAGLPTPRVLVSADDVTAGKPAPEPYLTGAHLLGLEPRVCAVFEDAHLGILAARAANVGFVVGVGAQTIGEDVDVSVADLSGITFDGSHLVIEADAVLTR

SEQ ID NO: 219 - protein, 228 aa, Amycolatopsis sp.
  source 1..228: note = Amycolatopsis sp. CA-230715
MENKIRAELRVRALLLDLDGTLVDSHAVTRRSWQRWAEAVGVPLESFFHRTHGRPGHEVMAEVLPRRSAAENLADSQALLGYELNDTDGVRALPGAARLLASLDDMPWAIVTASTKPLARAKLAAARLPVPDVLVTAEQVDAGKPDPAGYLLAARRLGVDPMWCAVVEDASAGVRAAIAAGMPVLGVGGPVDPMPTWDLAGLDDLEALPDGVLIRLVGSLAPANGAPV

SEQ ID NO: 220 - protein, 216 aa, Streptomyces smaragdinus
MTRERVQSDFGKYVLFDVDGTLIDATDNQRRVWKTWAGRYGLDPDAVHELALRTRPMETFAEVAPDRDPQECLAVLHELEDEDVRSGVYGAFDGASELLSALPPGCWGLVTSNYEHRVRGRFARTGLPVPGVVVDAAAVDEGKPSPVPYLLAAGRLGAEPEDCLVVEDAPSGVESGRRAGMTVWGVNTPGGVDGVHRHFTSLREAVPDILAFVAGG

SEQ ID NO: 221 - protein, 253 aa, Moniliella pollinis; identical to SEQ ID NO: 200

SEQ ID NO: 222 - protein, 265 aa, Bacillus amyloliquefaciens
MAKLDASGFLIDLDGTIFRGQELIDGATEAIHTLQSLGKSVVFLSNRGNLSRAMCRKKLLGAGIRTDERSIVLSSSVTASFLKKHYPLSKVWVLGEKGLTDELALAGVTMAQKPQAADWLVISLHETVTYEDLNLAFKAASSGARIIATNRDRSFPNEGGHAMDVVGMIGAIEASAGAKTELVVGKPSWLMAEAACEALGLPPVECAIIGDSLESDIAMGRLYGMKSVLVMTGSAKLGVPRLYEPDIVLDSIKDLTELAKEGILL

SEQ ID NO: 223 - DNA, 3718 bp, synthetic construct
  source 1..3718: mol_type = other DNA
agatgtagccggcgctgtagagttttggacggataggttgggtttcagtcgagacttcgttgaagatgactttgcaggcgtcgtgcgtgatgatgtgaccctgtttatctcggccgttcaagatcaagttgtccctgacaatacacttgcatgggtctgggtacgcggattagatgaattgtacgcggaatggtctgaagttgtatccactaactttcgtgacgcttcaggtcctgctatgactgagattggtgaacaaccctgggggcgtgagttcgcactccgagatccagctggaaattgtgttcatttcgtagctgaggaacaggattaatggtgttcaccactgttgcttcccctttgttggagcgtccgtcgttctgatggcgctctgagcccaaaatatcccttcttcgcccgagagcaagcctcggagtgtgcttgcaatctacttttcctactaaagttatcttcttgtggcttctgaatttgaatagaacgtgttcagacttgttagctaaatttgttgatgcgagatacttgacagaatcccgttgatgaactcatctgtgtgaccaccgcctggtgatggaatctcgcgcggaagccgtggtgttactgactctcaagcaattcagtagataaatttgtataacatcattgcaaggggtgctagcaatcaattgtccaataccaaacggcggcaagtgcaaaggggcgatagagagtttctgcgaggaagggaaggaatccgtatgcctgaaaacttttgtacaagtgtctttgtaagggcgaggtctgctctgacatctctctgagatctgagatctgatacctgcaggataacttcgtataatgtatgctatacgaagttatgtcacagtatcggcatctctgtctcgacgacagtgagtatagtcaactatgctatctagtagccaaagtaagtctacattccgggctttgcaggggttagctatttcattagacaatacttacaaccttcgaagggcttccccagaattcaattctatattgattcaatatccacccatcggacccgctctccgtaccccctgttcgcttcgccactacaaccatgtcaagacctgagaatcgtagcaaattgccccactacggcccgagtgctgtcggctggttaaagtagaatgacttgggtagccagatcgagacgcctgacattgatacgcagacagcgcagtcagtttcaaactgacaactgacgcgtactggattgacaggactccttggccggtgccattcgaatcgcttgtagacctcttgccagcatcttgccagagaagcttgaaggctggatcgctcagcctgagctcacacttagtagctccactagtcactcaggtgctcagcctctcctcagcgcctcaagctcaagcctcagggcctcagctgcatcgagctctggtgccagtgccagtgccagtgccagtgccagtgccagtgccagtgccagtgaagagagtggtatgagccaagctatacccaaaagcaaatgatggttattgccagcttccatgcacccctggggcgaaggacaacgaacaacagacagagtttgaattattcactggcctagtactaccaatttaaatttggtggttcagcgcaggaacggcgcgagtgagcgtaagggcaaactccgcatggggcgtgacgtcagtgtccctctggctgaggcactccagcaggctctggtcaacgcatcaacgtgtgtgtgtgtctaccaagcacattgtgcgctcgctgtccgtgcgccgaaatcgcaccagtcagaacgtctataaaacccctcttgcttggagggttaccgggccgtcttttcccaacgctccggctcactcactactctacacaacaaatggttaaagcagtgatttttaccgatttcgacggaacagtcacattggaggatagcaatgactacctgacggacacgcttggtttcggcaaggaaaaacgtcttaaagtcttcgagggtgtgttggacgatacgaagtccttccgtcaaggattcatggagatgttggagtcgatccacacgccttttcctgaatgtattaagatcttggaaaaaaaaattcgtctggacccgggctttaaagacactttcgagtgggcgcaagaaaatgacgttcccgtcatcgtcgtctcttctggtatgaagccgattatcaaggtgttgcttacgcgtttggtcggtcaggaatccatccacaaaattgacatcgtgtccaatgaagtcgagatcgacgcacatgaccagtggaaaatcatctataaagacgagagccctttcggacatgataagtcccgatccatcgatgcttacaagaagaagtttgagagcacgctcaaagctggagaacaacgccctgtttacttttattgcggagacggcgtctctgacttgtctgctgcgaaggaatgcgacctgctcttcgccaaacgtggaaaggatctcgttacttactgcaagaagcaaaacgtccccttccacgagtttgatacttttaaagatattttggcctccatgaaacaggtgttggctggagagaaaacggttgctgaactgatggagaactaacacggatcaacaaaaatgtgcgccagctttgttgtgtgcccttttcctctagcggatcctatccacatttcgtgaatgaaccgattaagctctgacgagatttccttgttttctgtagatacctcttgtagaggtgtcaaagttatgttgtgatcgagagagttacctgcaaggtattatgcaagcggcttgatgaggacactcaactacgtgtgagtaggagtgcgttgctcagcagttgacgcgtgagccgcttgagcagcttgataaaggtcctaatcgtcttccagctgttggcagacgacaatgtgctgtagtagtaggataggcccgtaaaagtgtagaagcaataggttgagactgactgtaatgggtacttgcgttcaaagactgaaagtccaaaggattgctcaaaggcccctgaggtctgagcctctgagcgcgctcttcgtcaaaattcgccggggccatcggtcatcctctcgagggcagcatcttcctgcttgaagactgagtccgtctcaggcttgctggtcacattattgtcagtacctaccatgaagaattcaatattattttacattgtcaaccattacatggatcccatgttgtgcatagcctctatgtcatcctttggtcttttatgtctgtagcgtgctagtagtattcaagttgtagcactgctgtgaaacagtacgttcaagtagtgtgcagcagtacgttcagttagtggactggggcagcctcgccttcagcaaaggttaggtacatgagccagttgctcactcttgctttctacgaatcccataggctactttgccccctaaccgtgacgaccccctgtgtttgagaagtttgagtctttttacgttaccgtgaccaagcgagcagagtagaaactcttgaagttgtgtatgtaagaatacaaattgagaacacaaggttacctacctttatagttggtaaacagcaagcaataccagagattttcatcgcaacgtgactctatcattcactatattaagttgcacacggatgttgtacaacactacacgtaaaagagagaaaaatactaatgtcgatcgctcaggt

SEQ ID NO: 224 - DNA, 726 bp, synthetic construct
  source 1..726: mol_type = other DNA
atggttaaagcagtgatttttaccgatttcgacggaacagtcacattggaggatagcaatgactacctgacggacacgcttggtttcggcaaggaaaaacgtcttaaagtcttcgagggtgtgttggacgatacgaagtccttccgtcaaggattcatggagatgttggagtcgatccacacgccttttcctgaatgtattaagatcttggaaaaaaaaattcgtctggacccgggctttaaagacactttcgagtgggcgcaagaaaatgacgttcccgtcatcgtcgtctcttctggtatgaagccgattatcaaggtgttgcttacgcgtttggtcggtcaggaatccatccacaaaattgacatcgtgtccaatgaagtcgagatcgacgcacatgaccagtggaaaatcatctataaagacgagagccctttcggacatgataagtcccgatccatcgatgcttacaagaagaagtttgagagcacgctcaaagctggagaacaacgccctgtttacttttattgcggagacggcgtctctgacttgtctgctgcgaaggaatgcgacctgctcttcgccaaacgtggaaaggatctcgttacttactgcaagaagcaaaacgtccccttccacgagtttgatacttttaaagatattttggcctccatgaaacaggtgttggctggagagaaaacggttgctgaactgatggagaactaa

SEQ ID NO: 225 - DNA, 3814 bp, synthetic construct
  source 1..3814: mol_type = other DNA
agatgtagccggcgctgtagagttttggacggataggttgggtttcagtcgagacttcgttgaagatgactttgcaggcgtcgtgcgtgatgatgtgaccctgtttatctcggccgttcaagatcaagttgtccctgacaatacacttgcatgggtctgggtacgcggattagatgaattgtacgcggaatggtctgaagttgtatccactaactttcgtgacgcttcaggtcctgctatgactgagattggtgaacaaccctgggggcgtgagttcgcactccgagatccagctggaaattgtgttcatttcgtagctgaggaacaggattaatggtgttcaccactgttgcttcccctttgttggagcgtccgtcgttctgatggcgctctgagcccaaaatatcccttcttcgcccgagagcaagcctcggagtgtgcttgcaatctacttttcctactaaagttatcttcttgtggcttctgaatttgaatagaacgtgttcagacttgttagctaaatttgttgatgcgagatacttgacagaatcccgttgatgaactcatctgtgtgaccaccgcctggtgatggaatctcgcgcggaagccgtggtgttactgactctcaagcaattcagtagataaatttgtataacatcattgcaaggggtgctagcaatcaattgtccaataccaaacggcggcaagtgcaaaggggcgatagagagtttctgcgaggaagggaaggaatccgtatgcctgaaaacttttgtacaagtgtctttgtaagggcgaggtctgctctgacatctctctgagatctgagatctgatacctgcaggataacttcgtataatgtatgctatacgaagttatgtcacagtatcggcatctctgtctcgacgacagtgagtatagtcaactatgctatctagtagccaaagtaagtctacattccgggctttgcaggggttagctatttcattagacaatacttacaaccttcgaagggcttccccagaattcaattctatattgattcaatatccacccatcggacccgctctccgtaccccctgttcgcttcgccactacaaccatgtcaagacctgagaatcgtagcaaattgccccactacggcccgagtgctgtcggctggttaaagtagaatgacttgggtagccagatcgagacgcctgacattgatacgcagacagcgcagtcagtttcaaactgacaactgacgcgtactggattgacaggactccttggccggtgccattcgaatcgcttgtagacctcttgccagcatcttgccagagaagcttgaaggctggatcgctcagcctgagctcacacttagtagctccactagtcactcaggtgctcagcctctcctcagcgcctcaagctcaagcctcagggcctcagctgcatcgagctctggtgccagtgccagtgccagtgccagtgccagtgccagtgccagtgccagtgaagagagtggtatgagccaagctatacccaaaagcaaatgatggttattgccagcttccatgcacccctggggcgaaggacaacgaacaacagacagagtttgaattattcactggcctagtactaccaatttaaatttggtggttcagcgcaggaacggcgcgagtgagcgtaagggcaaactccgcatggggcgtgacgtcagtgtccctctggctgaggcactccagcaggctctggtcaacgcatcaacgtgtgtgtgtgtctaccaagcacattgtgcgctcgctgtccgtgcgccgaaatcgcaccagtcagaacgtctataaaacccctcttgcttggagggttaccgggccgtcttttcccaacgctccggctcactcactactctacacaacaaatgtcctacgacgccaacggaaacctcaagtactcggatgccaagttcgtcttcctgaccgactttgatggtaccatcaccttgctcgactccaacgaccacatggttgacaactacggcatggggtacaccgagcgtcgtaagatcaacgaagcgatcgtttctgaacaaatttcttatcgtgatggtttccgcaagatggtcgaaagtgtccatgaacccttcagtgagatggaagcattggttcgtcgtgatgttacgctcgatccagggtttaaagatttccatgcgttcgccaaggctaatgatattccaatcattgtcgtatcgtctggtatgaccccggttattcgttccatctttgccaacttgattggtgatgaggaggctagcaagattgacgtcatctccaacgaggtcaagttcactgatcctgagggtaagggtaagacctgggaattggtctaccgccaccccgataaccactatggtcatgacaagagcctgtcaattttgccctaccgtgacctcaagacccgacctacgttgttctttgctggtgatggtattagtgacatgagtgctgctacgcacgctgatgtcttgttcgtaaaggacaagcctgacaacgatttgggtcgttactgcgatcgcaaaggatacccttacaaattgttcaaagactggaccgagatcaaagctgcagttcagagcatcattgaaggacaagctcaaccaaaggagatcatgaccgatttgggtaagaccaccggtaagacgcccgaacaacttgagcaagaatttaagaagcctattgcttaacacggatcaacaaaaatgtgcgccagctttgttgtgtgcccttttcctctagcggatcctatccacatttcgtgaatgaaccgattaagctctgacgagatttccttgttttctgtagatacctcttgtagaggtgtcaaagttatgttgtgatcgagagagttacctgcaaggtattatgcaagcggcttgatgaggacactcaactacgtgtgagtaggagtgcgttgctcagcagttgacgcgtgagccgcttgagcagcttgataaaggtcctaatcgtcttccagctgttggcagacgacaatgtgctgtagtagtaggataggcccgtaaaagtgtagaagcaataggttgagactgactgtaatgggtacttgcgttcaaagactgaaagtccaaaggattgctcaaaggcccctgaggtctgagcctctgagcgcgctcttcgtcaaaattcgccggggccatcggtcatcctctcgagggcagcatcttcctgcttgaagactgagtccgtctcaggcttgctggtcacattattgtcagtacctaccatgaagaattcaatattattttacattgtcaaccattacatggatcccatgttgtgcatagcctctatgtcatcctttggtcttttatgtctgtagcgtgctagtagtattcaagttgtagcactgctgtgaaacagtacgttcaagtagtgtgcagcagtacgttcagttagtggactggggcagcctcgccttcagcaaaggttaggtacatgagccagttgctcactcttgctttctacgaatcccataggctactttgccccctaaccgtgacgaccccctgtgtttgagaagtttgagtctttttacgttaccgtgaccaagcgagcagagtagaaactcttgaagttgtgtatgtaagaatacaaattgagaacacaaggttacctacctttatagttggtaaacagcaagcaataccagagattttcatcgcaacgtgactctatcattcactatattaagttgcacacggatgttgtacaacactacacgtaaaagagagaaaaatactaatgtcgatcgctcaggt

SEQ ID NO: 226 - DNA, 822 bp, synthetic construct
  source 1..822: mol_type = other DNA
atgtcctacgacgccaacggaaacctcaagtactcggatgccaagttcgtcttcctgaccgactttgatggtaccatcaccttgctcgactccaacgaccacatggttgacaactacggcatggggtacaccgagcgtcgtaagatcaacgaagcgatcgtttctgaacaaatttcttatcgtgatggtttccgcaagatggtcgaaagtgtccatgaacccttcagtgagatggaagcattggttcgtcgtgatgttacgctcgatccagggtttaaagatttccatgcgttcgccaaggctaatgatattccaatcattgtcgtatcgtctggtatgaccccggttattcgttccatctttgccaacttgattggtgatgaggaggctagcaagattgacgtcatctccaacgaggtcaagttcactgatcctgagggtaagggtaagacctgggaattggtctaccgccaccccgataaccactatggtcatgacaagagcctgtcaattttgccctaccgtgacctcaagacccgacctacgttgttctttgctggtgatggtattagtgacatgagtgctgctacgcacgctgatgtcttgttcgtaaaggacaagcctgacaacgatttgggtcgttactgcgatcgcaaaggatacccttacaaattgttcaaagactggaccgagatcaaagctgcagttcagagcatcattgaaggacaagctcaaccaaaggagatcatgaccgatttgggtaagaccaccggtaagacgcccgaacaacttgagcaagaatttaagaagcctattgcttaa

SEQ ID NO: 227 - DNA, 3814 bp, synthetic construct
  source 1..3814: mol_type = other DNA
agatgtagccggcgctgtagagttttggacggataggttgggtttcagtcgagacttcgttgaagatgactttgcaggcgtcgtgcgtgatgatgtgaccctgtttatctcggccgttcaagatcaagttgtccctgacaatacacttgcatgggtctgggtacgcggattagatgaattgtacgcggaatggtctgaagttgtatccactaactttcgtgacgcttcaggtcctgctatgactgagattggtgaacaaccctgggggcgtgagttcgcactccgagatccagctggaaattgtgttcatttcgtagctgaggaacaggattaatggtgttcaccactgttgcttcccctttgttggagcgtccgtcgttctgatggcgctctgagcccaaaatatcccttcttcgcccgagagcaagcctcggagtgtgcttgcaatctacttttcctactaaagttatcttcttgtggcttctgaatttgaatagaacgtgttcagacttgttagctaaatttgttgatgcgagatacttgacagaatcccgttgatgaactcatctgtgtgaccaccgcctggtgatggaatctcgcgcggaagccgtggtgttactgactctcaagcaattcagtagataaatttgtataacatcattgcaaggggtgctagcaatcaattgtccaataccaaacggcggcaagtgcaaaggggcgatagagagtttctgcgaggaagggaaggaatccgtatgcctgaaaacttttgtacaagtgtctttgtaagggcgaggtctgctctgacatctctctgagatctgagatctgatacctgcaggataacttcgtataatgtatgctatacgaagttatgtcacagtatcggcatctctgtctcgacgacagtgagtatagtcaactatgctatctagtagccaaagtaagtctacattccgggctttgcaggggttagctatttcattagacaatacttacaaccttcgaagggcttccccagaattcaattctatattgattcaatatccacccatcggacccgctctccgtaccccctgttcgcttcgccactacaaccatgtcaagacctgagaatcgtagcaaattgccccactacggcccgagtgctgtcggctggttaaagtagaatgacttgggtagccagatcgagacgcctgacattgatacgcagacagcgcagtcagtttcaaactgacaactgacgcgtactggattgacaggactccttggccggtgccattcgaatcgcttgtagacctcttgccagcatcttgccagagaagcttgaaggctggatcgctcagcctgagctcacacttagtagctccactagtcactcaggtgctcagcctctcctcagcgcctcaagctcaagcctcagggcctcagctgcatcgagctctggtgccagtgccagtgccagtgccagtgccagtgccagtgccagtgccagtgaagagagtggtatgagccaagctatacccaaaagcaaatgatggttattgccagcttccatgcacccctggggcgaaggacaacgaacaacagacagagtttgaattattcactggcctagtactaccaatttaaatttggtggttcagcgcaggaacggcgcgagtgagcgtaagggcaaactccgcatggggcgtgacgtcagtgtccctctggctgaggcactccagcaggctctggtcaacgcatcaacgtgtgtgtgtgtctaccaagcacattgtgcgctcgctgtccgtgcgccgaaatcgcaccagtcagaacgtctataaaacccctcttgcttggagggttaccgggccgtcttttcccaacgctccggctcactcactactctacacaacaaatgtcttacgacgatgctggccaacttaagtattcggacgccaagtttgtctttttgaccgactttgacggtacgattacattgctcgattctaatgatcatatggtagacaactacggtatggggtacaccgaacgtcgaaagattaacgaagcaattattcatgaacaaatttcttatcgtgatggcttccgtaagatggtcgaaagtgttcatgaaccgtttagtgaaatggaagcgttggtacgacgtgacgttacgctcgacccaggattcaaagaattccatcaattcgctaaacagcaccatatcccgatcattgttgtttcatccggtatgaccccgattattcgatcaatctttgcgaatttggttggtgatgaggaagcaagcaagatcgatgttatctcgaacgatgtcaagtttaccgatccagaggggaaaggcaaaacatgggaattggtctatcgtcaccctgataatcattatggacacgataaatctctttcaatcttaccgtatcggggtttagtcaatcgtcctaccctcttctttgctggtgatggaatcagtgatatgagtgctgctacacatgctgatgtacttttcgtcaaagataaaccagacaacgatttgggacggtattgtgaccgaaagggatatccgtacaaattgttcaaagattggactcaaatcaaggctgcggttgagagcattattgatgaaaatgcagaaccacaagagatcatgacggatttgggcaagactaccggtaagacacctgaacagttggaagaggaagctcagaaacacgctgcttaacacggatcaacaaaaatgtgcgccagctttgttgtgtgcccttttcctctagcggatcctatccacatttcgtgaatgaaccgattaagctctgacgagatttccttgttttctgtagatacctcttgtagaggtgtcaaagttatgttgtgatcgagagagttacctgcaaggtattatgcaagcggcttgatgaggacactcaactacgtgtgagtaggagtgcgttgctcagcagttgacgcgtgagccgcttgagcagcttgataaaggtcctaatcgtcttccagctgttggcagacgacaatgtgctgtagtagtaggataggcccgtaaaagtgtagaagcaataggttgagactgactgtaatgggtacttgcgttcaaagactgaaagtccaaaggattgctcaaaggcccctgaggtctgagcctctgagcgcgctcttcgtcaaaattcgccggggccatcggtcatcctctcgagggcagcatcttcctgcttgaagactgagtccgtctcaggcttgctggtcacattattgtcagtacctaccatgaagaattcaatattattttacattgtcaaccattacatggatcccatgttgtgcatagcctctatgtcatcctttggtcttttatgtctgtagcgtgctagtagtattcaagttgtagcactgctgtgaaacagtacgttcaagtagtgtgcagcagtacgttcagttagtggactggggcagcctcgccttcagcaaaggttaggtacatgagccagttgctcactcttgctttctacgaatcccataggctactttgccccctaaccgtgacgaccccctgtgtttgagaagtttgagtctttttacgttaccgtgaccaagcgagcagagtagaaactcttgaagttgtgtatgtaagaatacaaattgagaacacaaggttacctacctttatagttggtaaacagcaagcaataccagagattttcatcgcaacgtgactctatcattcactatattaagttgcacacggatgttgtacaacactacacgtaaaagagagaaaaatactaatgtcgatcgctcaggt

SEQ ID NO: 228 - DNA, 822 bp, synthetic construct
  source 1..822: mol_type = other DNA
atgtcttacgacgatgctggccaacttaagtattcggacgccaagtttgtctttttgaccgactttgacggtacgattacattgctcgattctaatgatcatatggtagacaactacggtatggggtacaccgaacgtcgaaagattaacgaagcaattattcatgaacaaatttcttatcgtgatggcttccgtaagatggtcgaaagtgttcatgaaccgtttagtgaaatggaagcgttggtacgacgtgacgttacgctcgacccaggattcaaagaattccatcaattcgctaaacagcaccatatcccgatcattgttgtttcatccggtatgaccccgattattcgatcaatctttgcgaatttggttggtgatgaggaagcaagcaagatcgatgttatctcgaacgatgtcaagtttaccgatccagaggggaaaggcaaaacatgggaattggtctatcgtcaccctgataatcattatggacacgataaatctctttcaatcttaccgtatcggggtttagtcaatcgtcctaccctcttctttgctggtgatggaatcagtgatatgagtgctgctacacatgctgatgtacttttcgtcaaagataaaccagacaacgatttgggacggtattgtgaccgaaagggatatccgtacaaattgttcaaagattggactcaaatcaaggctgcggttgagagcattattgatgaaaatgcagaaccacaagagatcatgacggatttgggcaagactaccggtaagacacctgaacagttggaagaggaagctcagaaacacgctgcttaa

SEQ ID NO: 229 - DNA, 3754 bp, synthetic construct
  source 1..3754: mol_type = other DNA
agatgtagccggcgctgtagagttttggacggataggttgggtttcagtcgagacttcgttgaagatgactttgcaggcgtcgtgcgtgatgatgtgaccctgtttatctcggccgttcaagatcaagttgtccctgacaatacacttgcatgggtctgggtacgcggattagatgaattgtacgcggaatggtctgaagttgtatccactaactttcgtgacgcttcaggtcctgctatgactgagattggtgaacaaccctgggggcgtgagttcgcactccgagatccagctggaaattgtgttcatttcgtagctgaggaacaggattaatggtgttcaccactgttgcttcccctttgttggagcgtccgtcgttctgatggcgctctgagcccaaaatatcccttcttcgcccgagagcaagcctcggagtgtgcttgcaatctacttttcctactaaagttatcttcttgtggcttctgaatttgaatagaacgtgttcagacttgttagctaaatttgttgatgcgagatacttgacagaatcccgttgatgaactcatctgtgtgaccaccgcctggtgatggaatctcgcgcggaagccgtggtgttactgactctcaagcaattcagtagataaatttgtataacatcattgcaaggggtgctagcaatcaattgtccaataccaaacggcggcaagtgcaaaggggcgatagagagtttctgcgaggaagggaaggaatccgtatgcctgaaaacttttgtacaagtgtctttgtaagggcgaggtctgctctgacatctctctgagatctgagatctgatacctgcaggataacttcgtataatgtatgctatacgaagttatgtcacagtatcggcatctctgtctcgacgacagtgagtatagtcaactatgctatctagtagccaaagtaagtctacattccgggctttgcaggggttagctatttcattagacaatacttacaaccttcgaagggcttccccagaattcaattctatattgattcaatatccacccatcggacccgctctccgtaccccctgttcgcttcgccactacaaccatgtcaagacctgagaatcgtagcaaattgccccactacggcccgagtgctgtcggctggttaaagtagaatgacttgggtagccagatcgagacgcctgacattgatacgcagacagcgcagtcagtttcaaactgacaactgacgcgtactggattgacaggactccttggccggtgccattcgaatcgcttgtagacctcttgccagcatcttgccagagaagcttgaaggctggatcgctcagcctgagctcacacttagtagctccactagtcactcaggtgctcagcctctcctcagcgcctcaagctcaagcctcagggcctcagctgcatcgagctctggtgccagtgccagtgccagtgccagtgccagtgccagtgccagtgccagtgaagagagtggtatgagccaagctatacccaaaagcaaatgatggttattgccagcttccatgcacccctggggcgaaggacaacgaacaacagacagagtttgaattattcactggcctagtactaccaatttaaatttggtggttcagcgcaggaacggcgcgagtgagcgtaagggcaaactccgcatggggcgtgacgtcagtgtccctctggctgaggcactccagcaggctctggtcaacgcatcaacgtgtgtgtgtgtctaccaagcacattgtgcgctcgctgtccgtgcgccgaaatcgcaccagtcagaacgtctataaaacccctcttgcttggagggttaccgggccgtcttttcccaacgctccggctcactcactactctacacaacaaatggttaccgagatcgaagtggatgcggtgctgttcgacatggacggcaccctgattgactctacccctgctgtcaaccagacttgggccgagtacatcgaacgatacaacctcgactttgactacgtcatgtctcattgtcacggatgtcgaacggtagagagcctcaagaatatcgttggattgccggatgaccagttggaacaaggcgtagtcgagtttgaagggcgtattagtgaactggctgaagaggcggcacgtaccaatggtcctggtcaaattgtggctttgcccggcgcaaaagaactgcttgcccaactgaacaagggtagcgaacaacctggtcgtcgtcctggatgggccatcgttacttcggcaaccaaggcttacgcttacgtgggcttcagagcgtcgggcgtgaatggtacagaattccctcgtgcttttgtcacgggtgacaatgtcagcaagggcaaacctgatcctgaaccatacctcttgggagcaaagacgttacaacctcctgctgatcctaaacgttgtctcgtaatcgaagatgctcctccaggtattcgatcaggtgttgctgcaggtgccaaaacccttggattgaccactacccacgcggaaaacctcatgtggcaagcgggtgctaactgggtcgtaccagacttatcgagtgtttcggcacgttgggaaggtgaaggtgcggacgctcgtctttttattcgcattgaaaactcaggccagcgtccagagtaacacggatcaacaaaaatgtgcgccagctttgttgtgtgcccttttcctctagcggatcctatccacatttcgtgaatgaaccgattaagctctgacgagatttccttgttttctgtagatacctcttgtagaggtgtcaaagttatgttgtgatcgagagagttacctgcaaggtattatgcaagcggcttgatgaggacactcaactacgtgtgagtaggagtgcgttgctcagcagttgacgcgtgagccgcttgagcagcttgataaaggtcctaatcgtcttccagctgttggcagacgacaatgtgctgtagtagtaggataggcccgtaaaagtgtagaagcaataggttgagactgactgtaatgggtacttgcgttcaaagactgaaagtccaaaggattgctcaaaggcccctgaggtctgagcctctgagcgcgctcttcgtcaaaattcgccggggccatcggtcatcctctcgagggcagcatcttcctgcttgaagactgagtccgtctcaggcttgctggtcacattattgtcagtacctaccatgaagaattcaatattattttacattgtcaaccattacatggatcccatgttgtgcatagcctctatgtcatcctttggtcttttatgtctgtagcgtgctagtagtattcaagttgtagcactgctgtgaaacagtacgttcaagtagtgtgcagcagtacgttcagttagtggactggggcagcctcgccttcagcaaaggttaggtacatgagccagttgctcactcttgctttctacgaatcccataggctactttgccccctaaccgtgacgaccccctgtgtttgagaagtttgagtctttttacgttaccgtgaccaagcgagcagagtagaaactcttgaagttgtgtatgtaagaatacaaattgagaacacaaggttacctacctttatagttggtaaacagcaagcaataccagagattttcatcgcaacgtgactctatcattcactatattaagttgcacacggatgttgtacaacactacacgtaaaagagagaaaaatactaatgtcgatcgctcaggt

SEQ ID NO: 230 - DNA, 762 bp, synthetic construct
  source 1..762: mol_type = other DNA
atggttaccgagatcgaagtggatgcggtgctgttcgacatggacggcaccctgattgactctacccctgctgtcaaccagacttgggccgagtacatcgaacgatacaacctcgactttgactacgtcatgtctcattgtcacggatgtcgaacggtagagagcctcaagaatatcgttggattgccggatgaccagttggaacaaggcgtagtcgagtttgaagggcgtattagtgaactggctgaagaggcggcacgtaccaatggtcctggtcaaattgtggctttgcccggcgcaaaagaactgcttgcccaactgaacaagggtagcgaacaacctggtcgtcgtcctggatgggccatcgttacttcggcaaccaaggcttacgcttacgtgggcttcagagcgtcgggcgtgaatggtacagaattccctcgtgcttttgtcacgggtgacaatgtcagcaagggcaaacctgatcctgaaccatacctcttgggagcaaagacgttacaacctcctgctgatcctaaacgttgtctcgtaatcgaagatgctcctccaggtattcgatcaggtgttgctgcaggtgccaaaacccttggattgaccactacccacgcggaaaacctcatgtggcaagcgggtgctaactgggtcgtaccagacttatcgagtgtttcggcacgttgggaaggtgaaggtgcggacgctcgtctttttattcgcattgaaaactcaggccagcgtccagagtaa

SEQ ID NO: 231 - DNA, 3706 bp, synthetic construct
  source 1..3706: mol_type = other DNA
agatgtagccggcgctgtagagttttggacggataggttgggtttcagtcgagacttcgttgaagatgactttgcaggcgtcgtgcgtgatgatgtgaccctgtttatctcggccgttcaagatcaagttgtccctgacaatacacttgcatgggtctgggtacgcggattagatgaattgtacgcggaatggtctgaagttgtatccactaactttcgtgacgcttcaggtcctgctatgactgagattggtgaacaaccctgggggcgtgagttcgcactccgagatccagctggaaattgtgttcatttcgtagctgaggaacaggattaatggtgttcaccactgttgcttcccctttgttggagcgtccgtcgttctgatggcgctctgagcccaaaatatcccttcttcgcccgagagcaagcctcggagtgtgcttgcaatctacttttcctactaaagttatcttcttgtggcttctgaatttgaatagaacgtgttcagacttgttagctaaatttgttgatgcgagatacttgacagaatcccgttgatgaactcatctgtgtgaccaccgcctggtgatggaatctcgcgcggaagccgtggtgttactgactctcaagcaattcagtagataaatttgtataacatcattgcaaggggtgctagcaatcaattgtccaataccaaacggcggcaagtgcaaaggggcgatagagagtttctgcgaggaagggaaggaatccgtatgcctgaaaacttttgtacaagtgtctttgtaagggcgaggtctgctctgacatctctctgagatctgagatctgatacctgcaggataacttcgtataatgtatgctatacgaagttatgtcacagtatcggcatctctgtctcgacgacagtgagtatagtcaactatgctatctagtagccaaagtaagtctacattccgggctttgcaggggttagctatttcattagacaatacttacaaccttcgaagggcttccccagaattcaattctatattgattcaatatccacccatcggacccgctctccgtaccccctgttcgcttcgccactacaaccatgtcaagacctgagaatcgtagcaaattgccccactacggcccgagtgctgtcggctggttaaagtagaatgacttgggtagccagatcgagacgcctgacattgatacgcagacagcgcagtcagtttcaaactgacaactgacgcgtactggattgacaggactccttggccggtgccattcgaatcgcttgtagacctcttgccagcatcttgccagagaagcttgaaggctggatcgctcagcctgagctcacacttagtagctccactagtcactcaggtgctcagcctctcctcagcgcctcaagctcaagcctcagggcctcagctgcatcgagctctggtgccagtgccagtgccagtgccagtgccagtgccagtgccagtgccagtgaagagagtggtatgagccaagctatacccaaaagcaaatgatggttattgccagcttccatgcacccctggggcgaaggacaacgaacaacagacagagtttgaattattcactggcctagtactaccaatttaaatttggtggttcagcgcaggaacggcgcgagtgagcgtaagggcaaactccgcatggggcgtgacgtcagtgtccctctggctgaggcactccagcaggctctggtcaacgcatcaacgtgtgtgtgtgtctaccaagcacattgtgcgctcgctgtccgtgcgccgaaatcgcaccagtcagaacgtctataaaacccctcttgcttggagggttaccgggccgtcttttcccaacgctccggctcactcactactctacacaacaaatggtcaacgcggttatcttcacggactttgacggtactgtgacctggcaagacagcaacgacttcctcacggataccaagggttttggtaaggaggaacgctctaaggtgttcgaaggcgtgttggacggcaccaaatcgtttcgtgacggattttgggacatgctcgagtctgtgaaaaccccattcccggaatgcgttaaacttgtggaggagaatatccaacttgacccaggctttaaagatacttttgaatgggctcaagaaaatggcgtgcccattgttgtgatcagcagcggaatgcgtcccctcattaaggctcttcttgcacgactggttggaccagaagccatcgaaaagattgacattgttagcaacgaggttgagatcgactctgacggccagtggcgtattgtctacaaggatgacagctcttttggacacgacaagtccaaatccatcaccgcctataagaaacaattcgaagctgcaggtaaaaaaccgacctatttttactgcggtgacggcgtctcggatcttagcgcggcaaaagagtgcgacctgttgttcgctaagcgcggaaaggatctggtgacctactgtaagcgcgaacacgtcccattccatgagtttgataccttcgaggacattctttcgtcgatgaaagatgttctcgcaggcaagaagacagttacagagttgatgcagaattaacacggatcaacaaaaatgtgcgccagctttgttgtgtgcccttttcctctagcggatcctatccacatttcgtgaatgaaccgattaagctctgacgagatttccttgttttctgtagatacctcttgtagaggtgtcaaagttatgttgtgatcgagagagttacctgcaaggtattatgcaagcggcttgatgaggacactcaactacgtgtgagtaggagtgcgttgctcagcagttgacgcgtgagccgcttgagcagcttgataaaggtcctaatcgtcttccagctgttggcagacgacaatgtgctgtagtagtaggataggcccgtaaaagtgtagaagcaataggttgagactgactgtaatgggtacttgcgttcaaagactgaaagtccaaaggattgctcaaaggcccctgaggtctgagcctctgagcgcgctcttcgtcaaaattcgccggggccatcggtcatcctctcgagggcagcatcttcctgcttgaagactgagtccgtctcaggcttgctggtcacattattgtcagtacctaccatgaagaattcaatattattttacattgtcaaccattacatggatcccatgttgtgcatagcctctatgtcatcctttggtcttttatgtctgtagcgtgctagtagtattcaagttgtagcactgctgtgaaacagtacgttcaagtagtgtgcagcagtacgttcagttagtggactggggcagcctcgccttcagcaaaggttaggtacatgagccagttgctcactcttgctttctacgaatcccataggctactttgccccctaaccgtgacgaccccctgtgtttgagaagtttgagtctttttacgttaccgtgaccaagcgagcagagtagaaactcttgaagttgtgtatgtaagaatacaaattgagaacacaaggttacctacctttatagttggtaaacagcaagcaataccagagattttcatcgcaacgtgactctatcattcactatattaagttgcacacggatgttgtacaacactacacgtaaaagagagaaaaatactaatgtcgatcgctcaggt

SEQ ID NO: 232 - DNA, 714 bp, synthetic construct
  source 1..714: mol_type = other DNA
atggtcaacgcggttatcttcacggactttgacggtactgtgacctggcaagacagcaacgacttcctcacggataccaagggttttggtaaggaggaacgctctaaggtgttcgaaggcgtgttggacggcaccaaatcgtttcgtgacggattttgggacatgctcgagtctgtgaaaaccccattcccggaatgcgttaaacttgtggaggagaatatccaacttgacccaggctttaaagatacttttgaatgggctcaagaaaatggcgtgcccattgttgtgatcagcagcggaatgcgtcccctcattaaggctcttcttgcacgactggttggaccagaagccatcgaaaagattgacattgttagcaacgaggttgagatcgactctgacggccagtggcgtattgtctacaaggatgacagctcttttggacacgacaagtccaaatccatcaccgcctataagaaacaattcgaagctgcaggtaaaaaaccgacctatttttactgcggtgacggcgtctcggatcttagcgcggcaaaagagtgcgacctgttgttcgctaagcgcggaaaggatctggtgacctactgtaagcgcgaacacgtcccattccatgagtttgataccttcgaggacattctttcgtcgatgaaagatgttctcgcaggcaagaagacagttacagagttgatgcagaattaa

SEQ ID NO: 233 - DNA, 3718 bp, synthetic construct
  source 1..3718: mol_type = other DNA
agatgtagccggcgctgtagagttttggacggataggttgggtttcagtcgagacttcgttgaagatgactttgcaggcgtcgtgcgtgatgatgtgaccctgtttatctcggccgttcaagatcaagttgtccctgacaatacacttgcatgggtctgggtacgcggattagatgaattgtacgcggaatggtctgaagttgtatccactaactttcgtgacgcttcaggtcctgctatgactgagattggtgaacaaccctgggggcgtgagttcgcactccgagatccagctggaaattgtgttcatttcgtagctgaggaacaggattaatggtgttcaccactgttgcttcccctttgttggagcgtccgtcgttctgatggcgctctgagcccaaaatatcccttcttcgcccgagagcaagcctcggagtgtgcttgcaatctacttttcctactaaagttatcttcttgtggcttctgaatttgaatagaacgtgttcagacttgttagctaaatttgttgatgcgagatacttgacagaatcccgttgatgaactcatctgtgtgaccaccgcctggtgatggaatctcgcgcggaagccgtggtgttactgactctcaagcaattcagtagataaatttgtataacatcattgcaaggggtgctagcaatcaattgtccaataccaaacggcggcaagtgcaaaggggcgatagagagtttctgcgaggaagggaaggaatccgtatgcctgaaaacttttgtacaagtgtctttgtaagggcgaggtctgctctgacatctctctgagatctgagatctgatacctgcaggataacttcgtataatgtatgctatacgaagttatgtcacagtatcggcatctctgtctcgacgacagtgagtatagtcaactatgctatctagtagccaaagtaagtctacattccgggctttgcaggggttagctatttcattagacaatacttacaaccttcgaagggcttccccagaattcaattctatattgattcaatatccacccatcggacccgctctccgtaccccctgttcgcttcgccactacaaccatgtcaagacctgagaatcgtagcaaattgccccactacggcccgagtgctgtcggctggttaaagtagaatgacttgggtagccagatcgagacgcctgacattgatacgcagacagcgcagtcagtttcaaactgacaactgacgcgtactggattgacaggactccttggccggtgccattcgaatcgcttgtagacctcttgccagcatcttgccagagaagcttgaaggctggatcgctcagcctgagctcacacttagtagctccactagtcactcaggtgctcagcctctcctcagcgcctcaagctcaagcctcagggcctcagctgcatcgagctctggtgccagtgccagtgccagtgccagtgccagtgccagtgccagtgccagtgaagagagtggtatgagccaagctatacccaaaagcaaatgatggttattgccagcttccatgcacccctggggcgaaggacaacgaacaacagacagagtttgaattattcactggcctagtactaccaatttaaatttggtggttcagcgcaggaacggcgcgagtgagcgtaagggcaaactccgcatggggcgtgacgtcagtgtccctctggctgaggcactccagcaggctctggtcaacgcatcaacgtgtgtgtgtgtctaccaagcacattgtgcgctcgctgtccgtgcgccgaaatcgcaccagtcagaacgtctataaaacccctcttgcttggagggttaccgggccgtcttttcccaacgctccggctcactcactactctacacaacaaatggtcaaggctgtcatctttactgacttcgacggaacggttacccttgaagatagcaacgattacctcacggacacgttgggattcggcaaggagaagcgtctgaaagtgtttgaaggcgtgctcgatgataccaagtcgtttcgccagggttttatggaaatgcttgagtccatccatacgccctttcctgagtgtatcaaaatcctggagaagaagatccgtcttgatcctggttttaaggatacattcgaatgggcacaagaaaatgatgtcccggttattgtggttagctccggcatgaagcctattattaaggtgctgctcacgcgccttgtcggccaggaaagcatccataagatcgatatcgtgtctaacgaagtcgaaattgatgcccatgaccagtggaagattatctacaaagacgaaagcccatttggacacgataagtcgcgttccatcgacgcctacaaaaaaaaatttgagtctacgctgaaagcgggcgagcagcgcccggtttatttctattgcggagatggcgtcagcgatctttctgcagcaaaagaatgtgatcttttgttcgctaaacgtggcaaagacttggttacttactgtaagaagcagaatgtgccctttcacgaatttgacactttcaaggatatcctggctagcatgaaacaagtgctcgcgggtgaaaaaacagtcgctgagctcatggagaactaacacggatcaacaaaaatgtgcgccagctttgttgtgtgcccttttcctctagcggatcctatccacatttcgtgaatgaaccgattaagctctgacgagatttccttgttttctgtagatacctcttgtagaggtgtcaaagttatgttgtgatcgagagagttacctgcaaggtattatgcaagcggcttgatgaggacactcaactacgtgtgagtaggagtgcgttgctcagcagttgacgcgtgagccgcttgagcagcttgataaaggtcctaatcgtcttccagctgttggcagacgacaatgtgctgtagtagtaggataggcccgtaaaagtgtagaagcaataggttgagactgactgtaatgggtacttgcgttcaaagactgaaagtccaaaggattgctcaaaggcccctgaggtctgagcctctgagcgcgctcttcgtcaaaattcgccggggccatcggtcatcctctcgagggcagcatcttcctgcttgaagactgagtccgtctcaggcttgctggtcacattattgtcagtacctaccatgaagaattcaatattattttacattgtcaaccattacatggatcccatgttgtgcatagcctctatgtcatcctttggtcttttatgtctgtagcgtgctagtagtattcaagttgtagcactgctgtgaaacagtacgttcaagtagtgtgcagcagtacgttcagttagtggactggggcagcctcgccttcagcaaaggttaggtacatgagccagttgctcactcttgctttctacgaatcccataggctactttgccccctaaccgtgacgaccccctgtgtttgagaagtttgagtctttttacgttaccgtgaccaagcgagcagagtagaaactcttgaagttgtgtatgtaagaatacaaattgagaacacaaggttacctacctttatagttggtaaacagcaagcaataccagagattttcatcgcaacgtgactctatcattcactatattaagttgcacacggatgttgtacaacactacacgtaaaagagagaaaaatactaatgtcgatcgctcaggt

SEQ ID NO: 234 - DNA, 726 bp, synthetic construct
  source 1..726: mol_type = other DNA
atggtcaaggctgtcatctttactgacttcgacggaacggttacccttgaagatagcaacgattacctcacggacacgttgggattcggcaaggagaagcgtctgaaagtgtttgaaggcgtgctcgatgataccaagtcgtttcgccagggttttatggaaatgcttgagtccatccatacgccctttcctgagtgtatcaaaatcctggagaagaagatccgtcttgatcctggttttaaggatacattcgaatgggcacaagaaaatgatgtcccggttattgtggttagctccggcatgaagcctattattaaggtgctgctcacgcgccttgtcggccaggaaagcatccataagatcgatatcgtgtctaacgaagtcgaaattgatgcccatgaccagtggaagattatctacaaagacgaaagcccatttggacacgataagtcgcgttccatcgacgcctacaaaaaaaaatttgagtctacgctgaaagcgggcgagcagcgcccggtttatttctattgcggagatggcgtcagcgatctttctgcagcaaaagaatgtgatcttttgttcgctaaacgtggcaaagacttggttacttactgtaagaagcagaatgtgccctttcacgaatttgacactttcaaggatatcctggctagcatgaaacaagtgctcgcgggtgaaaaaacagtcgctgagctcatggagaactaa

SEQ ID NO: 235 - DNA, 3715 bp, synthetic construct
  source 1..3715: mol_type = other DNA
agatgtagccggcgctgtagagttttggacggataggttgggtttcagtcgagacttcgttgaagatgactttgcaggcgtcgtgcgtgatgatgtgaccctgtttatctcggccgttcaagatcaagttgtccctgacaatacacttgcatgggtctgggtacgcggattagatgaattgtacgcggaatggtctgaagttgtatccactaactttcgtgacgcttcaggtcctgctatgactgagattggtgaacaaccctgggggcgtgagttcgcactccgagatccagctggaaattgtgttcatttcgtagctgaggaacaggattaatggtgttcaccactgttgcttcccctttgttggagcgtccgtcgttctgatggcgctctgagcccaaaatatcccttcttcgcccgagagcaagcctcggagtgtgcttgcaatctacttttcctactaaagttatcttcttgtggcttctgaatttgaatagaacgtgttcagacttgttagctaaatttgttgatgcgagatacttgacagaatcccgttgatgaactcatctgtgtgaccaccgcctggtgatggaatctcgcgcggaagccgtggtgttactgactctcaagcaattcagtagataaatttgtataacatcattgcaaggggtgctagcaatcaattgtccaataccaaacggcggcaagtgcaaaggggcgatagagagtttctgcgaggaagggaaggaatccgtatgcctgaaaacttttgtacaagtgtctttgtaagggcgaggtctgctctgacatctctctgagatctgagatctgatacctgcaggataacttcgtataatgtatgctatacgaagttatgtcacagtatcggcatctctgtctcgacgacagtgagtatagtcaactatgctatctagtagccaaagtaagtctacattccgggctttgcaggggttagctatttcattagacaatacttacaaccttcgaagggcttccccagaattcaattctatattgattcaatatccacccatcggacccgctctccgtaccccctgttcgcttcgccactacaaccatgtcaagacctgagaatcgtagcaaattgccccactacggcccgagtgctgtcggctggttaaagtagaatgacttgggtagccagatcgagacgcctgacattgatacgcagacagcgcagtcagtttcaaactgacaactgacgcgtactggattgacaggactccttggccggtgccattcgaatcgcttgtagacctcttgccagcatcttgccagagaagcttgaaggctggatcgctcagcctgagctcacacttagtagctccactagtcactcaggtgctcagcctctcctcagcgcctcaagctcaagcctcagggcctcagctgcatcgagctctggtgccagtgccagtgccagtgccagtgccagtgccagtgccagtgccagtgaagagagtggtatgagccaagctatacccaaaagcaaatgatggttattgccagcttccatgcacccctggggcgaaggacaacgaacaacagacagagtttgaattattcactggcctagtactaccaatttaaatttggtggttcagcgcaggaacggcgcgagtgagcgtaagggcaaactccgcatggggcgtgacgtcagtgtccctctggctgaggcactccagcaggctctggtcaacgcatcaacgtgtgtgtgtgtctaccaagcacattgtgcgctcgctgtccgtgcgccgaaatcgcaccagtcagaacgtctataaaacccctcttgcttggagggttaccgggccgtcttttcccaacgctccggctcactcactactctacacaacaaatggtgaaagctgtcatcttttcggattttgacggtacgatcacactccaggattccaatgacttcttggtcgataataagggaatgggaaagaatgatcgtttgaaacttttcgagggtgtcttgaatggcacgaaaaattttcgtgacatcttcagcgacatgctgggtagcctgaatcttacccaggaagagggtattgagttcttgaaagagaatatcgaacttgacccaggattcaaaaagacgttcctgtgggcccaagaaaacaacgtcccgcttattgtcgtttcgtccggaaccgttccggtgattcgtgcactccttactaagatgatcggttccgacattgagaaacttgacatcgtctctaatgacctggaggtgaatgaatcgaaccactggaccgttctttaccgcgactcgactccacacggtcatgacaagagcaagacaattgacgactataaatctaaatacgaatcccaacttgtcgagggtgaggagcgtccggtctatttctactgcggcgacggtatctccgacctcactgcagccaaagagtgtgaccttttgtttgccaaggcaggtaaggatctcatcacattttgtaaaaagcagaacgtgccctatcacgagtttaatacatgggatgacatcctgcgctcgatgaaagcggtcctgaacggagaaaaaacagtgaaggaacttatggagaattaacacggatcaacaaaaatgtgcgccagctttgttgtgtgcccttttcctctagcggatcctatccacatttcgtgaatgaaccgattaagctctgacgagatttccttgttttctgtagatacctcttgtagaggtgtcaaagttatgttgtgatcgagagagttacctgcaaggtattatgcaagcggcttgatgaggacactcaactacgtgtgagtaggagtgcgttgctcagcagttgacgcgtgagccgcttgagcagcttgataaaggtcctaatcgtcttccagctgttggcagacgacaatgtgctgtagtagtaggataggcccgtaaaagtgtagaagcaataggttgagactgactgtaatgggtacttgcgttcaaagactgaaagtccaaaggattgctcaaaggcccctgaggtctgagcctctgagcgcgctcttcgtcaaaattcgccggggccatcggtcatcctctcgagggcagcatcttcctgcttgaagactgagtccgtctcaggcttgctggtcacattattgtcagtacctaccatgaagaattcaatattattttacattgtcaaccattacatggatcccatgttgtgcatagcctctatgtcatcctttggtcttttatgtctgtagcgtgctagtagtattcaagttgtagcactgctgtgaaacagtacgttcaagtagtgtgcagcagtacgttcagttagtggactggggcagcctcgccttcagcaaaggttaggtacatgagccagttgctcactcttgctttctacgaatcccataggctactttgccccctaaccgtgacgaccccctgtgtttgagaagtttgagtctttttacgttaccgtgaccaagcgagcagagtagaaactcttgaagttgtgtatgtaagaatacaaattgagaacacaaggttacctacctttatagttggtaaacagcaagcaataccagagattttcatcgcaacgtgactctatcattcactatattaagttgcacacggatgttgtacaacactacacgtaaaagagagaaaaatactaatgtcgatcgctcaggt

SEQ ID NO: 236 - DNA, 723 bp, synthetic construct
  source 1..723: mol_type = other DNA
atggtgaaagctgtcatcttttcggattttgacggtacgatcacactccaggattccaatgacttcttggtcgataataagggaatgggaaagaatgatcgtttgaaacttttcgagggtgtcttgaatggcacgaaaaattttcgtgacatcttcagcgacatgctgggtagcctgaatcttacccaggaagagggtattgagttcttgaaagagaatatcgaacttgacccaggattcaaaaagacgttcctgtgggcccaagaaaacaacgtcccgcttattgtcgtttcgtccggaaccgttccggtgattcgtgcactccttactaagatgatcggttccgacattgagaaacttgacatcgtctctaatgacctggaggtgaatgaatcgaaccactggaccgttctttaccgcgactcgactccacacggtcatgacaagagcaagacaattgacgactataaatctaaatacgaatcccaacttgtcgagggtgaggagcgtccggtctatttctactgcggcgacggtatctccgacctcactgcagccaaagagtgtgaccttttgtttgccaaggcaggtaaggatctcatcacattttgtaaaaagcagaacgtgccctatcacgagtttaatacatgggatgacatcctgcgctcgatgaaagcggtcctgaacggagaaaaaacagtgaaggaacttatggagaattaa

SEQ ID NO: 237 - DNA, 3718 bp, synthetic construct
  source 1..3718: mol_type = other DNA
agatgtagccggcgctgtagagttttggacggataggttgggtttcagtcgagacttcgttgaagatgactttgcaggcgtcgtgcgtgatgatgtgaccctgtttatctcggccgttcaagatcaagttgtccctgacaatacacttgcatgggtctgggtacgcggattagatgaattgtacgcggaatggtctgaagttgtatccactaactttcgtgacgcttcaggtcctgctatgactgagattggtgaacaaccctgggggcgtgagttcgcactccgagatccagctggaaattgtgttcatttcgtagctgaggaacaggattaatggtgttcaccactgttgcttcccctttgttggagcgtccgtcgttctgatggcgctctgagcccaaaatatcccttcttcgcccgagagcaagcctcggagtgtgcttgcaatctacttttcctactaaagttatcttcttgtggcttctgaatttgaatagaacgtgttcagacttgttagctaaatttgttgatgcgagatacttgacagaatcccgttgatgaactcatctgtgtgaccaccgcctggtgatggaatctcgcgcggaagccgtggtgttactgactctcaagcaattcagtagataaatttgtataacatcattgcaaggggtgctagcaatcaattgtccaataccaaacggcggcaagtgcaaaggggcgatagagagtttctgcgaggaagggaaggaatccgtatgcctgaaaacttttgtacaagtgtctttgtaagggcgaggtctgctctgacatctctctgagatctgagatctgatacctgcaggataacttcgtataatgtatgctatacgaagttatgtcacagtatcggcatctctgtctcgacgacagtgagtatagtcaactatgctatctagtagccaaagtaagtctacattccgggctttgcaggggttagctatttcattagacaatacttacaaccttcgaagggcttccccagaattcaattctatattgattcaatatccacccatcggacccgctctccgtaccccctgttcgcttcgccactacaaccatgtcaagacctgagaatcgtagcaaattgccccactacggcccgagtgctgtcggctggttaaagtagaatgacttgggtagccagatcgagacgcctgacattgatacgcagacagcgcagtcagtttcaaactgacaactgacgcgtactggattgacaggactccttggccggtgccattcgaatcgcttgtagacctcttgccagcatcttgccagagaagcttgaaggctggatcgctcagcctgagctcacacttagtagctccactagtcactcaggtgctcagcctctcctcagcgcctcaagctcaagcctcagggcctcagctgcatcgagctctggtgccagtgccagtgccagtgccagtgccagtgccagtgccagtgccagtgaagagagtggtatgagccaagctatacccaaaagcaaatgatggttattgccagcttccatgcacccctggggcgaaggacaacgaacaacagacagagtttgaattattcactggcctagtactaccaatttaaatttggtggttcagcgcaggaacggcgcgagtgagcgtaagggcaaactccgcatggggcgtgacgtcagtgtccctctggctgaggcactccagcaggctctggtcaacgcatcaacgtgtgtgtgtgtctaccaagcacattgtgcgctcgctgtccgtgcgccgaaatcgcaccagtcagaacgtctataaaacccctcttgcttggagggttaccgggccgtcttttcccaacgctccggctcactcactactctacacaacaaatggtcaaggcagtcatcttcacggactttgatggcactgtcaccctggaggatagcaacgattacctcacagacacacttggattcggcaaagaggaacgcctgaaagtttttgagggcgtgcttgatggaaccaaatcttttcgtcaaggtttcatggaaatgcttgagtctatccacactccttttcctgagtgcatcaaaattcttgaaaaaaaaatccgactcgatcctggctttaaagatacctttgaatgggcgcaagagaatgatgttcctgttgtggtcgtgtcgtctggaatgaagcccattatcaaagtgctgttgactcgattggtgggtcaacactcgatccataagattgacatcgtttcgaatgaggttgaaattgaggcgcacgatgaatggaaaatcatctataaggacgaaagcccctttggtcatgacaagtcgcgctcgattgacgcatataagaaaaaatttgaatccgccctgaaacctggagatgaacgcccagtttacttttactgcggagatggtgtcagcgatctgtccgccgcaaaagaatgtgatcttctgtttgccaaacgtggaaaggacctggtgacctactgcaagcgtcaaaatgtgccctttcacgaatttgacactttcgaagacatccttgcctccatgaaacaagtcctcgccggagaaaaaactgttacggagcttatggagaattaacacggatcaacaaaaatgtgcgccagctttgttgtgtgcccttttcctctagcggatcctatccacatttcgtgaatgaaccgattaagctctgacgagatttccttgttttctgtagatacctcttgtagaggtgtcaaagttatgttgtgatcgagagagttacctgcaaggtattatgcaagcggcttgatgaggacactcaactacgtgtgagtaggagtgcgttgctcagcagttgacgcgtgagccgcttgagcagcttgataaaggtcctaatcgtcttccagctgttggcagacgacaatgtgctgtagtagtaggataggcccgtaaaagtgtagaagcaataggttgagactgactgtaatgggtacttgcgttcaaagactgaaagtccaaaggattgctcaaaggcccctgaggtctgagcctctgagcgcgctcttcgtcaaaattcgccggggccatcggtcatcctctcgagggcagcatcttcctgcttgaagactgagtccgtctcaggcttgctggtcacattattgtcagtacctaccatgaagaattcaatattattttacattgtcaaccattacatggatcccatgttgtgcatagcctctatgtcatcctttggtcttttatgtctgtagcgtgctagtagtattcaagttgtagcactgctgtgaaacagtacgttcaagtagtgtgcagcagtacgttcagttagtggactggggcagcctcgccttcagcaaaggttaggtacatgagccagttgctcactcttgctttctacgaatcccataggctactttgccccctaaccgtgacgaccccctgtgtttgagaagtttgagtctttttacgttaccgtgaccaagcgagcagagtagaaactcttgaagttgtgtatgtaagaatacaaattgagaacacaaggttacctacctttatagttggtaaacagcaagcaataccagagattttcatcgcaacgtgactctatcattcactatattaagttgcacacggatgttgtacaacactacacgtaaaagagagaaaaatactaatgtcgatcgctcaggt

SEQ ID NO: 238 - DNA, 726 bp, synthetic construct
  source 1..726: mol_type = other DNA
atggtcaaggcagtcatcttcacggactttgatggcactgtcaccctggaggatagcaacgattacctcacagacacacttggattcggcaaagaggaacgcctgaaagtttttgagggcgtgcttgatggaaccaaatcttttcgtcaaggtttcatggaaatgcttgagtctatccacactccttttcctgagtgcatcaaaattcttgaaaaaaaaatccgactcgatcctggctttaaagatacctttgaatgggcgcaagagaatgatgttcctgttgtggtcgtgtcgtctggaatgaagcccattatcaaagtgctgttgactcgattggtgggtcaacactcgatccataagattgacatcgtttcgaatgaggttgaaattgaggcgcacgatgaatggaaaatcatctataaggacgaaagcccctttggtcatgacaagtcgcgctcgattgacgcatataagaaaaaatttgaatccgccctgaaacctggagatgaacgcccagtttacttttactgcggagatggtgtcagcgatctgtccgccgcaaaagaatgtgatcttctgtttgccaaacgtggaaaggacctggtgacctactgcaagcgtcaaaatgtgccctttcacgaatttgacactttcgaagacatccttgcctccatgaaacaagtcctcgccggagaaaaaactgttacggagcttatggagaattaa

SEQ ID NO: 239 - DNA, 3718 bp, synthetic construct
  source 1..3718: mol_type = other DNA
agatgtagccggcgctgtagagttttggacggataggttgggtttcagtcgagacttcgttgaagatgactttgcaggcgtcgtgcgtgatgatgtgaccctgtttatctcggccgttcaagatcaagttgtccctgacaatacacttgcatgggtctgggtacgcggattagatgaattgtacgcggaatggtctgaagttgtatccactaactttcgtgacgcttcaggtcctgctatgactgagattggtgaacaaccctgggggcgtgagttcgcactccgagatccagctggaaattgtgttcatttcgtagctgaggaacaggattaatggtgttcaccactgttgcttcccctttgttggagcgtccgtcgttctgatggcgctctgagcccaaaatatcccttcttcgcccgagagcaagcctcggagtgtgcttgcaatctacttttcctactaaagttatcttcttgtggcttctgaatttgaatagaacgtgttcagacttgttagctaaatttgttgatgcgagatacttgacagaatcccgttgatgaactcatctgtgtgaccaccgcctggtgatggaatctcgcgcggaagccgtggtgttactgactctcaagcaattcagtagataaatttgtataacatcattgcaaggggtgctagcaatcaattgtccaataccaaacggcggcaagtgcaaaggggcgatagagagtttctgcgaggaagggaaggaatccgtatgcctgaaaacttttgtacaagtgtctttgtaagggcgaggtctgctctgacatctctctgagatctgagatctgatacctgcaggataacttcgtataatgtatgctatacgaagttatgtcacagtatcggcatctctgtctcgacgacagtgagtatagtcaactatgctatctagtagccaaagtaagtctacattccgggctttgcaggggttagctatttcattagacaatacttacaaccttcgaagggcttccccagaattcaattctatattgattcaatatccacccatcggacccgctctccgtaccccctgttcgcttcgccactacaaccatgtcaagacctgagaatcgtagcaaattgccccactacggcccgagtgctgtcggctggttaaagtagaatgacttgggtagccagatcgagacgcctgacattgatacgcagacagcgcagtcagtttcaaactgacaactgacgcgtactggattgacaggactccttggccggtgccattcgaatcgcttgtagacctcttgccagcatcttgccagagaagcttgaaggctggatcgctcagcctgagctcacacttagtagctccactagtcactcaggtgctcagcctctcctcagcgcctcaagctcaagcctcagggcctcagctgcatcgagctctggtgccagtgccagtgccagtgccagtgccagtgccagtgccagtgccagtgaagagagtggtatgagccaagctatacccaaaagcaaatgatggttattgccagcttccatgcacccctggggcgaaggacaacgaacaacagacagagtttgaattattcactggcctagtactaccaatttaaatttggtggttcagcgcaggaacggcgcgagtgagcgtaagggcaaactccgcatggggcgtgacgtcagtgtccctctggctgaggcactccagcaggctctggtcaacgcatcaacgtgtgtgtgtgtctaccaagcacattgtgcgctcgctgtccgtgcgccgaaatcgcaccagtcagaacgtctataaaacccctcttgcttggagggttaccgggccgtcttttcccaacgctccggctcactcactactctacacaacaaatggtgaaggctgttatcttttctgactttgatggcacaatcacttggcaagactccaacgattacctcactgatacgctcggctttggtaaggaagagcgcctgaaaatcttcgagggcgtcttggatggaaccaagccctttcgagagggtttcacacaaatgattagcagcattgagactccactcccagaatgtttggctatcctcaaagaaaaaattcaacttgaccctggattcaagaagacctatgaatggagcctggagcatagcgtccctttgatcgtggtttcctcgggcatgaaaccaattatcaaagcactcttggagaacatgcttggtgaggaagcgatcaaaaatcttgagatcgtggcaaatgacgtcgagcttgatgcaaacaataagatgacggtcacgtaccgcgacgaaactcctttcggtcatgataaatccaagtccattgacaattttaaggcccattacgaggcgcagctgccggaaggagctgaaaagccgacttatttctactgtggcgacggcatctccgatctgtcggcagcgaaagagtgcgatttgctctttgcgaaacgtggtaaagatcttgtgacgtattgcaagcgtcaaaacgtccccttccacgaattcgatacttttgaggatattctccgaagcatgaaccaagtcctcgatggagagaaaacggtttctgagcttatggagaactaacacggatcaacaaaaatgtgcgccagctttgttgtgtgcccttttcctctagcggatcctatccacatttcgtgaatgaaccgattaagctctgacgagatttccttgttttctgtagatacctcttgtagaggtgtcaaagttatgttgtgatcgagagagttacctgcaaggtattatgcaagcggcttgatgaggacactcaactacgtgtgagtaggagtgcgttgctcagcagttgacgcgtgagccgcttgagcagcttgataaaggtcctaatcgtcttccagctgttggcagacgacaatgtgctgtagtagtaggataggcccgtaaaagtgtagaagcaataggttgagactgactgtaatgggtacttgcgttcaaagactgaaagtccaaaggattgctcaaaggcccctgaggtctgagcctctgagcgcgctcttcgtcaaaattcgccggggccatcggtcatcctctcgagggcagcatcttcctgcttgaagactgagtccgtctcaggcttgctggtcacattattgtcagtacctaccatgaagaattcaatattattttacattgtcaaccattacatggatcccatgttgtgcatagcctctatgtcatcctttggtcttttatgtctgtagcgtgctagtagtattcaagttgtagcactgctgtgaaacagtacgttcaagtagtgtgcagcagtacgttcagttagtggactggggcagcctcgccttcagcaaaggttaggtacatgagccagttgctcactcttgctttctacgaatcccataggctactttgccccctaaccgtgacgaccccctgtgtttgagaagtttgagtctttttacgttaccgtgaccaagcgagcagagtagaaactcttgaagttgtgtatgtaagaatacaaattgagaacacaaggttacctacctttatagttggtaaacagcaagcaataccagagattttcatcgcaacgtgactctatcattcactatattaagttgcacacggatgttgtacaacactacacgtaaaagagagaaaaatactaatgtcgatcgctcaggt

SEQ ID NO: 240 - DNA, 726 bp, synthetic construct
  source 1..726: mol_type = other DNA
atggtgaaggctgttatcttttctgactttgatggcacaatcacttggcaagactccaacgattacctcactgatacgctcggctttggtaaggaagagcgcctgaaaatcttcgagggcgtcttggatggaaccaagccctttcgagagggtttcacacaaatgattagcagcattgagactccactcccagaatgtttggctatcctcaaagaaaaaattcaacttgaccctggattcaagaagacctatgaatggagcctggagcatagcgtccctttgatcgtggtttcctcgggcatgaaaccaattatcaaagcactcttggagaacatgcttggtgaggaagcgatcaaaaatcttgagatcgtggcaaatgacgtcgagcttgatgcaaacaataagatgacggtcacgtaccgcgacgaaactcctttcggtcatgataaatccaagtccattgacaattttaaggcccattacgaggcgcagctgccggaaggagctgaaaagccgacttatttctactgtggcgacggcatctccgatctgtcggcagcgaaagagtgcgatttgctctttgcgaaacgtggtaaagatcttgtgacgtattgcaagcgtcaaaacgtccccttccacgaattcgatacttttgaggatattctccgaagcatgaaccaagtcctcgatggagagaaaacggtttctgagcttatggagaactaa

SEQ ID NO: 241 - DNA, 3766 bp, synthetic construct
  source 1..3766: mol_type = other DNA
agatgtagccggcgctgtagagttttggacggataggttgggtttcagtcgagacttcgttgaagatgactttgcaggcgtcgtgcgtgatgatgtgaccctgtttatctcggccgttcaagatcaagttgtccctgacaatacacttgcatgggtctgggtacgcggattagatgaattgtacgcggaatggtctgaagttgtatccactaactttcgtgacgcttcaggtcctgctatgactgagattggtgaacaaccctgggggcgtgagttcgcactccgagatccagctggaaattgtgttcatttcgtagctgaggaacaggattaatggtgttcaccactgttgcttcccctttgttggagcgtccgtcgttctgatggcgctctgagcccaaaatatcccttcttcgcccgagagcaagcctcggagtgtgcttgcaatctacttttcctactaaagttatcttcttgtggcttctgaatttgaatagaacgtgttcagacttgttagctaaatttgttgatgcgagatacttgacagaatcccgttgatgaactcatctgtgtgaccaccgcctggtgatggaatctcgcgcggaagccgtggtgttactgactctcaagcaattcagtagataaatttgtataacatcattgcaaggggtgctagcaatcaattgtccaataccaaacggcggcaagtgcaaaggggcgatagagagtttctgcgaggaagggaaggaatccgtatgcctgaaaacttttgtacaagtgtctttgtaagggcgaggtctgctctgacatctctctgagatctgagatctgatacctgcaggataacttcgtataatgtatgctatacgaagttatgtcacagtatcggcatctctgtctcgacgacagtgagtatagtcaactatgctatctagtagccaaagtaagtctacattccgggctttgcaggggttagctatttcattagacaatacttacaaccttcgaagggcttccccagaattcaattctatattgattcaatatccacccatcggacccgctctccgtaccccctgttcgcttcgccactacaaccatgtcaagacctgagaatcgtagcaaattgccccactacggcccgagtgctgtcggctggttaaagtagaatgacttgggtagccagatcgagacgcctgacattgatacgcagacagcgcagtcagtttcaaactgacaactgacgcgtactggattgacaggactccttggccggtgccattcgaatcgcttgtagacctcttgccagcatcttgccagagaagcttgaaggctggatcgctcagcctgagctcacacttagtagctccactagtcactcaggtgctcagcctctcctcagcgcctcaagctcaagcctcagggcctcagctgcatcgagctctggtgccagtgccagtgccagtgccagtgccagtgccagtgccagtgccagtgaagagagtggtatgagccaagctatacccaaaagcaaatgatggttattgccagcttccatgcacccctggggcgaaggacaacgaacaacagacagagtttgaattattcactggcctagtactaccaatttaaatttggtggttcagcgcaggaacggcgcgagtgagcgtaagggcaaactccgcatggggcgtgacgtcagtgtccctctggctgaggcactccagcaggctctggtcaacgcatcaacgtgtgtgtgtgtctaccaagcacattgtgcgctcgctgtccgtgcgccgaaatcgcaccagtcagaacgtctataaaacccctcttgcttggagggttaccgggccgtcttttcccaacgctccggctcactcactactctacacaacaaatgggttccaccctggacatcgcactccctgcgcttaagactaagccgaagttcatcttcttcacagattttgatggcactattactcaacaagattcgaacgactggatgactgataatttgggatttggcgcggagcttcgcaaaaagggtaatgaggacgtgttgtttggccgtcgcgacttccgtgattctttcgcagatatgctggattccattaagaccccgtttaatgaatgcattgaacttcttctcaaaaacattactcttgatccgggtttcaagcagttcttcgagtgggcaaaagaaaataatgttcccatcgtcattttgtcgggcggaatggaaccagtcatccgcgcgttgttggcacatatgctcggtaaagaagaggcagaaacgcttcaaattgtctcgaacgatgtcgcaccccgtccgggtaagtctgttaatgaggcgggcggatggcacatcgtttaccatgatgacagcggcttcggtcatgacaaatcgcttgaaatccgtccgtacgcacgcctcccggcagaagagcgccctgttctgttttatgcgggtgacggagtctctgacctgtctgctgcgaaagagacggatctcctcttcgcaaaatctggtcgcgatcttgtctcgtattgcgaacgtgagaacgtgccatttaccacgtttcaagattttacagaaatcttggcaacggttaaagacatcgttgcaggcaagacgactgttaaggaagctgccactggacgaaaataacacggatcaacaaaaatgtgcgccagctttgttgtgtgcccttttcctctagcggatcctatccacatttcgtgaatgaaccgattaagctctgacgagatttccttgttttctgtagatacctcttgtagaggtgtcaaagttatgttgtgatcgagagagttacctgcaaggtattatgcaagcggcttgatgaggacactcaactacgtgtgagtaggagtgcgttgctcagcagttgacgcgtgagccgcttgagcagcttgataaaggtcctaatcgtcttccagctgttggcagacgacaatgtgctgtagtagtaggataggcccgtaaaagtgtagaagcaataggttgagactgactgtaatgggtacttgcgttcaaagactgaaagtccaaaggattgctcaaaggcccctgaggtctgagcctctgagcgcgctcttcgtcaaaattcgccggggccatcggtcatcctctcgagggcagcatcttcctgcttgaagactgagtccgtctcaggcttgctggtcacattattgtcagtacctaccatgaagaattcaatattattttacattgtcaaccattacatggatcccatgttgtgcatagcctctatgtcatcctttggtcttttatgtctgtagcgtgctagtagtattcaagttgtagcactgctgtgaaacagtacgttcaagtagtgtgcagcagtacgttcagttagtggactggggcagcctcgccttcagcaaaggttaggtacatgagccagttgctcactcttgctttctacgaatcccataggctactttgccccctaaccgtgacgaccccctgtgtttgagaagtttgagtctttttacgttaccgtgaccaagcgagcagagtagaaactcttgaagttgtgtatgtaagaatacaaattgagaacacaaggttacctacctttatagttggtaaacagcaagcaataccagagattttcatcgcaacgtgactctatcattcactatattaagttgcacacggatgttgtacaacactacacgtaaaagagagaaaaatactaatgtcgatcgctcaggt

SEQ ID NO: 242 - DNA, 774 bp, synthetic construct
  source 1..774: mol_type = other DNA
atgggttccaccctggacatcgcactccctgcgcttaagactaagccgaagttcatcttcttcacagattttgatggcactattactcaacaagattcgaacgactggatgactgataatttgggatttggcgcggagcttcgcaaaaagggtaatgaggacgtgttgtttggccgtcgcgacttccgtgattctttcgcagatatgctggattccattaagaccccgtttaatgaatgcattgaacttcttctcaaaaacattactcttgatccgggtttcaagcagttcttcgagtgggcaaaagaaaataatgttcccatcgtcattttgtcgggcggaatggaaccagtcatccgcgcgttgttggcacatatgctcggtaaagaagaggcagaaacgcttcaaattgtctcgaacgatgtcgcaccccgtccgggtaagtctgttaatgaggcgggcggatggcacatcgtttaccatgatgacagcggcttcggtcatgacaaatcgcttgaaatccgtccgtacgcacgcctcccggcagaagagcgccctgttctgttttatgcgggtgacggagtctctgacctgtctgctgcgaaagagacggatctcctcttcgcaaaatctggtcgcgatcttgtctcgtattgcgaacgtgagaacgtgccatttaccacgtttcaagattttacagaaatcttggcaacggttaaagacatcgttgcaggcaagacgactgttaaggaagctgccactggacgaaaataa

SEQ ID NO: 243 - DNA, 3751 bp, synthetic construct
  source 1..3751: mol_type = other DNA
agatgtagccggcgctgtagagttttggacggataggttgggtttcagtcgagacttcgttgaagatgactttgcaggcgtcgtgcgtgatgatgtgaccctgtttatctcggccgttcaagatcaagttgtccctgacaatacacttgcatgggtctgggtacgcggattagatgaattgtacgcggaatggtctgaagttgtatccactaactttcgtgacgcttcaggtcctgctatgactgagattggtgaacaaccctgggggcgtgagttcgcactccgagatccagctggaaattgtgttcatttcgtagctgaggaacaggattaatggtgttcaccactgttgcttcccctttgttggagcgtccgtcgttctgatggcgctctgagcccaaaatatcccttcttcgcccgagagcaagcctcggagtgtgcttgcaatctacttttcctactaaagttatcttcttgtggcttctgaatttgaatagaacgtgttcagacttgttagctaaatttgttgatgcgagatacttgacagaatcccgttgatgaactcatctgtgtgaccaccgcctggtgatggaatctcgcgcggaagccgtggtgttactgactctcaagcaattcagtagataaatttgtataacatcattgcaaggggtgctagcaatcaattgtccaataccaaacggcggcaagtgcaaaggggcgatagagagtttctgcgaggaagggaaggaatccgtatgcctgaaaacttttgtacaagtgtctttgtaagggcgaggtctgctctgacatctctctgagatctgagatctgatacctgcaggataacttcgtataatgtatgctatacgaagttatgtcacagtatcggcatctctgtctcgacgacagtgagtatagtcaactatgctatctagtagccaaagtaagtctacattccgggctttgcaggggttagctatttcattagacaatacttacaaccttcgaagggcttccccagaattcaattctatattgattcaatatccacccatcggacccgctctccgtaccccctgttcgcttcgccactacaaccatgtcaagacctgagaatcgtagcaaattgccccactacggcccgagtgctgtcggctggttaaagtagaatgacttgggtagccagatcgagacgcctgacattgatacgcagacagcgcagtcagtttcaaactgacaactgacgcgtactggattgacaggactccttggccggtgccattcgaatcgcttgtagacctcttgccagcatcttgccagagaagcttgaaggctggatcgctcagcctgagctcacacttagtagctccactagtcactcaggtgctcagcctctcctcagcgcctcaagctcaagcctcagggcctcagctgcatcgagctctggtgccagtgccagtgccagtgccagtgccagtgccagtgccagtgccagtgaagagagtggtatgagccaagctatacccaaaagcaaatgatggttattgccagcttccatgcacccctggggcgaaggacaacgaacaacagacagagtttgaattattcactggcctagtactaccaatttaaatttggtggttcagcgcaggaacggcgcgagtgagcgtaagggcaaactccgcatggggcgtgacgtcagtgtccctctggctgaggcactccagcaggctctggtcaacgcatcaacgtgtgtgtgtgtctaccaagcacattgtgcgctcgctgtccgtgcgccgaaatcgcaccagtcagaacgtctataaaacccctcttgcttggagggttaccgggccgtcttttcccaacgctccggctcactcactactctacacaacaaatgagcactagcactacgccagcacccgcagtgaacggtactccggctcttaagacaaacccaaagtatattgtttttaccgactgggacggcaccgttacgctgcaggattctaatgaccatatgactcacaacctcggcttcggttacgaaaaacgaattgctttgaatgaccgtatcctggatggctctattagcttccgcgatgcttttcaagagatgcttgatagcattcacactccgtttccagaatgtatcgactacctcctgaaagagatccagttggatccgggattcccagatttttataagtgggcgaaggccaacaatattccaattgtggttgtgtctagcggtatgaaacccatcatccatgcactgttggttaaactggtgggcaagaccgcagcggatgatattgaaatcattagcaatgatgtcgcaattaaggaggacggttcttgggatattgtttttcgagacgaaagcgatttcggccatgacaaatcgcgttgcattcgaccatataccgcaatctctgaccgacctacgcttttctactgcggtgacggagtctcggatctctcggcggctcgcgaaaccgatctcctttttgcgaaggaaggaaaggacctcatcacatattgtaagcgagaacacatcccttataccacgttcgcctcgtttaaagatattcattctaaaatccaaaatattgtggaaggtaagaagactgtgaaggagtcgcaggataactaacacggatcaacaaaaatgtgcgccagctttgttgtgtgcccttttcctctagcggatcctatccacatttcgtgaatgaaccgattaagctctgacgagatttccttgttttctgtagatacctcttgtagaggtgtcaaagttatgttgtgatcgagagagttacctgcaaggtattatgcaagcggcttgatgaggacactcaactacgtgtgagtaggagtgcgttgctcagcagttgacgcgtgagccgcttgagcagcttgataaaggtcctaatcgtcttccagctgttggcagacgacaatgtgctgtagtagtaggataggcccgtaaaagtgtagaagcaataggttgagactgactgtaatgggtacttgcgttcaaagactgaaagtccaaaggattgctcaaaggcccctgaggtctgagcctctgagcgcgctcttcgtcaaaattcgccggggccatcggtcatcctctcgagggcagcatcttcctgcttgaagactgagtccgtctcaggcttgctggtcacattattgtcagtacctaccatgaagaattcaatattattttacattgtcaaccattacatggatcccatgttgtgcatagcctctatgtcatcctttggtcttttatgtctgtagcgtgctagtagtattcaagttgtagcactgctgtgaaacagtacgttcaagtagtgtgcagcagtacgttcagttagtggactggggcagcctcgccttcagcaaaggttaggtacatgagccagttgctcactcttgctttctacgaatcccataggctactttgccccctaaccgtgacgaccccctgtgtttgagaagtttgagtctttttacgttaccgtgaccaagcgagcagagtagaaactcttgaagttgtgtatgtaagaatacaaattgagaacacaaggttacctacctttatagttggtaaacagcaagcaataccagagattttcatcgcaacgtgactctatcattcactatattaagttgcacacggatgttgtacaacactacacgtaaaagagagaaaaatactaatgtcgatcgctcaggt

SEQ ID NO: 244 - DNA, 759 bp, synthetic construct
  source 1..759: mol_type = other DNA
atgagcactagcactacgccagcacccgcagtgaacggtactccggctcttaagacaaacccaaagtatattgtttttaccgactgggacggcaccgttacgctgcaggattctaatgaccatatgactcacaacctcggcttcggttacgaaaaacgaattgctttgaatgaccgtatcctggatggctctattagcttccgcgatgcttttcaagagatgcttgatagcattcacactccgtttccagaatgtatcgactacctcctgaaagagatccagttggatccgggattcccagatttttataagtgggcgaaggccaacaatattccaattgtggttgtgtctagcggtatgaaacccatcatccatgcactgttggttaaactggtgggcaagaccgcagcggatgatattgaaatcattagcaatgatgtcgcaattaaggaggacggttcttgggatattgtttttcgagacgaaagcgatttcggccatgacaaatcgcgttgcattcgaccatataccgcaatctctgaccgacctacgcttttctactgcggtgacggagtctcggatctctcggcggctcgcgaaaccgatctcctttttgcgaaggaaggaaaggacctcatcacatattgtaagcgagaacacatcccttataccacgttcgcctcgtttaaagatattcattctaaaatccaaaatattgtggaaggtaagaagactgtgaaggagtcgcaggataactaa

SEQ ID NO: 245 - DNA, 3709 bp, synthetic construct
  source 1..3709: mol_type = other DNA
agatgtagccggcgctgtagagttttggacggataggttgggtttcagtcgagacttcgttgaagatgactttgcaggcgtcgtgcgtgatgatgtgaccctgtttatctcggccgttcaagatcaagttgtccctgacaatacacttgcatgggtctgggtacgcggattagatgaattgtacgcggaatggtctgaagttgtatccactaactttcgtgacgcttcaggtcctgctatgactgagattggtgaacaaccctgggggcgtgagttcgcactccgagatccagctggaaattgtgttcatttcgtagctgaggaacaggattaatggtgttcaccactgttgcttcccctttgttggagcgtccgtcgttctgatggcgctctgagcccaaaatatcccttcttcgcccgagagcaagcctcggagtgtgcttgcaatctacttttcctactaaagttatcttcttgtggcttctgaatttgaatagaacgtgttcagacttgttagctaaatttgttgatgcgagatacttgacagaatcccgttgatgaactcatctgtgtgaccaccgcctggtgatggaatctcgcgcggaagccgtggtgttactgactctcaagcaattcagtagataaatttgtataacatcattgcaaggggtgctagcaatcaattgtccaataccaaacggcggcaagtgcaaaggggcgatagagagtttctgcgaggaagggaaggaatccgtatgcctgaaaacttttgtacaagtgtctttgtaagggcgaggtctgctctgacatctctctgagatctgagatctgatacctgcaggataacttcgtataatgtatgctatacgaagttatgtcacagtatcggcatctctgtctcgacgacagtgagtatagtcaactatgctatctagtagccaaagtaagtctacattccgggctttgcaggggttagctatttcattagacaatacttacaaccttcgaagggcttccccagaattcaattctatattgattcaatatccacccatcggacccgctctccgtaccccctgttcgcttcgccactacaaccatgtcaagacctgagaatcgtagcaaattgccccactacggcccgagtgctgtcggctggttaaagtagaatgacttgggtagccagatcgagacgcctgacattgatacgcagacagcgcagtcagtttcaaactgacaactgacgcgtactggattgacaggactccttggccggtgccattcgaatcgcttgtagacctcttgccagcatcttgccagagaagcttgaaggctggatcgctcagcctgagctcacacttagtagctccactagtcactcaggtgctcagcctctcctcagcgcctcaagctcaagcctcagggcctcagctgcatcgagctctggtgccagtgccagtgccagtgccagtgccagtgccagtgccagtgccagtgaagagagtggtatgagccaagctatacccaaaagcaaatgatggttattgccagcttccatgcacccctggggcgaaggacaacgaacaacagacagagtttgaattattcactggcctagtactaccaatttaaatttggtggttcagcgcaggaacggcgcgagtgagcgtaagggcaaactccgcatggggcgtgacgtcagtgtccctctggctgaggcactccagcaggctctggtcaacgcatcaacgtgtgtgtgtgtctaccaagcacattgtgcgctcgctgtccgtgcgccgaaatcgcaccagtcagaacgtctataaaacccctcttgcttggagggttaccgggccgtcttttcccaacgctccggctcactcactactctacacaacaaatgtcccctcctgcaatcgtgttcaccgactgggatggaactgttacacttcaagactcgaacgatgtcctgacagacaaccttggctttggttacgaaaagcgaaaagttctcaatgatcgtatgttgaatgaaacgctgtctttccgtgaaggtttcgacgagatgcttcgatccatccctgcgaatggtcactcttttcaggaatgtgttgactaccttttgcaacatatcaaactggaccctggttttaaggaattctactactggtgccatgaaaatggtatccctatctacgttatctcgtctggcatgtcgccgattattgaggctctcctgaagaaactcctgggccagcaggttatgaaccacgttactattatcagcaacggtgtcgagattaacggcaacgactggcacatcgtctatcgagacgacacaccttttggtcacgacaaggcagcctccattaaacagtgtctcatgaactacgatctctctaaaaagccatatttgttctattgcggagatggcgtttctgacctttctgcggccaagtcgtgtgacctgctctttgcgcgtcgcggcaaagatctggtcaccttttgcattaaacagaagatccatttcactcaatttgatacgttccgcgatatcctctcggacatccaaaaaattgtttccggagaaaaaaagttggaagattgctttgagtaacacggatcaacaaaaatgtgcgccagctttgttgtgtgcccttttcctctagcggatcctatccacatttcgtgaatgaaccgattaagctctgacgagatttccttgttttctgtagatacctcttgtagaggtgtcaaagttatgttgtgatcgagagagttacctgcaaggtattatgcaagcggcttgatgaggacactcaactacgtgtgagtaggagtgcgttgctcagcagttgacgcgtgagccgcttgagcagcttgataaaggtcctaatcgtcttccagctgttggcagacgacaatgtgctgtagtagtaggataggcccgtaaaagtgtagaagcaataggttgagactgactgtaatgggtacttgcgttcaaagactgaaagtccaaaggattgctcaaaggcccctgaggtctgagcctctgagcgcgctcttcgtcaaaattcgccggggccatcggtcatcctctcgagggcagcatcttcctgcttgaagactgagtccgtctcaggcttgctggtcacattattgtcagtacctaccatgaagaattcaatattattttacattgtcaaccattacatggatcccatgttgtgcatagcctctatgtcatcctttggtcttttatgtctgtagcgtgctagtagtattcaagttgtagcactgctgtgaaacagtacgttcaagtagtgtgcagcagtacgttcagttagtggactggggcagcctcgccttcagcaaaggttaggtacatgagccagttgctcactcttgctttctacgaatcccataggctactttgccccctaaccgtgacgaccccctgtgtttgagaagtttgagtctttttacgttaccgtgaccaagcgagcagagtagaaactcttgaagttgtgtatgtaagaatacaaattgagaacacaaggttacctacctttatagttggtaaacagcaagcaataccagagattttcatcgcaacgtgactctatcattcactatattaagttgcacacggatgttgtacaacactacacgtaaaagagagaaaaatactaatgtcgatcgctcaggt

SEQ ID NO: 246 - DNA, 717 bp, synthetic construct
  source 1..717: mol_type = other DNA
atgtcccctcctgcaatcgtgttcaccgactgggatggaactgttacacttcaagactcgaacgatgtcctgacagacaaccttggctttggttacgaaaagcgaaaagttctcaatgatcgtatgttgaatgaaacgctgtctttccgtgaaggtttcgacgagatgcttcgatccatccctgcgaatggtcactcttttcaggaatgtgttgactaccttttgcaacatatcaaactggaccctggttttaaggaattctactactggtgccatgaaaatggtatccctatctacgttatctcgtctggcatgtcgccgattattgaggctctcctgaagaaactcctgggccagcaggttatgaaccacgttactattatcagcaacggtgtcgagattaacggcaacgactggcacatcgtctatcgagacgacacaccttttggtcacgacaaggcagcctccattaaacagtgtctcatgaactacgatctctctaaaaagccatatttgttctattgcggagatggcgtttctgacctttctgcggccaagtcgtgtgacctgctctttgcgcgtcgcggcaaagatctggtcaccttttgcattaaacagaagatccatttcactcaatttgatacgttccgcgatatcctctcggacatccaaaaaattgtttccggagaaaaaaagttggaagattgctttgagtaa

SEQ ID NO: 247 - DNA, 3724 bp, synthetic construct
  source 1..3724: mol_type = other DNA
agatgtagccggcgctgtagagttttggacggataggttgggtttcagtcgagacttcgttgaagatgactttgcaggcgtcgtgcgtgatgatgtgaccctgtttatctcggccgttcaagatcaagttgtccctgacaatacacttgcatgggtctgggtacgcggattagatgaattgtacgcggaatggtctgaagttgtatccactaactttcgtgacgcttcaggtcctgctatgactgagattggtgaacaaccctgggggcgtgagttcgcactccgagatccagctggaaattgtgttcatttcgtagctgaggaacaggattaatggtgttcaccactgttgcttcccctttgttggagcgtccgtcgttctgatggcgctctgagcccaaaatatcccttcttcgcccgagagcaagcctcggagtgtgcttgcaatctacttttcctactaaagttatcttcttgtggcttctgaatttgaatagaacgtgttcagacttgttagctaaatttgttgatgcgagatacttgacagaatcccgttgatgaactcatctgtgtgaccaccgcctggtgatggaatctcgcgcggaagccgtggtgttactgactctcaagcaattcagtagataaatttgtataacatcattgcaaggggtgctagcaatcaattgtccaataccaaacggcggcaagtgcaaaggggcgatagagagtttctgcgaggaagggaaggaatccgtatgcctgaaaacttttgtacaagtgtctttgtaagggcgaggtctgctctgacatctctctgagatctgagatctgatacctgcaggataacttcgtataatgtatgctatacgaagttatgtcacagtatcggcatctctgtctcgacgacagtgagtatagtcaactatgctatctagtagccaaagtaagtctacattccgggctttgcaggggttagctatttcattagacaatacttacaaccttcgaagggcttccccagaattcaattctatattgattcaatatccacccatcggacccgctctccgtaccccctgttcgcttcgccactacaaccatgtcaagacctgagaatcgtagcaaattgccccactacggcccgagtgctgtcggctggttaaagtagaatgacttgggtagccagatcgagacgcctgacattgatacgcagacagcgcagtcagtttcaaactgacaactgacgcgtactggattgacaggactccttggccggtgccattcgaatcgcttgtagacctcttgccagcatcttgccagagaagcttgaaggctggatcgctcagcctgagctcacacttagtagctccactagtcactcaggtgctcagcctctcctcagcgcctcaagctcaagcctcagggcctcagctgcatcgagctctggtgccagtgccagtgccagtgccagtgccagtgccagtgccagtgccagtgaagagagtggtatgagccaagctatacccaaaagcaaatgatggttattgccagcttccatgcacccctggggcgaaggacaacgaacaacagacagagtttgaattattcactggcctagtactaccaatttaaatttggtggttcagcgcaggaacggcgcgagtgagcgtaagggcaaactccgcatggggcgtgacgtcagtgtccctctggctgaggcactccagcaggctctggtcaacgcatcaacgtgtgtgtgtgtctaccaagcacattgtgcgctcgctgtccgtgcgccgaaatcgcaccagtcagaacgtctataaaacccctcttgcttggagggttaccgggccgtcttttcccaacgctccggctcactcactactctacacaacaaatgtcgggtcccccggcaatcgtgtttacagactgggatggtactgttactttgcaggactccaatgactatctgactgagaatttgggatttggcaagcctcgacgcctggagattaacgatgagattttgaatgaacgcgtgtccttccaagagggattcacggagatgcttaaatccatccctacaccatttcccgagtgtatcgaataccttttgaaacacattcaactggaccctggatttaaggatttctatcactggtgttttgagcgtaacatcccagtgattgttatctcctccggtatgaaaccgatcatccacgcgttgctgaagaaccttgttggtgatgaagcaattaaaaacattgaaatcattagcaatgaagttgatgtcaaagcggatggctcttggaacatcgtttacaaggaccctgaaacctccttcggtcatgataagtctaaatccattcgcgagtatcttgagcgcaacggatactcctcccagaatgtgcctttgctgttttactgtggtgacggtgtgtccgacctctcggctgcgaaggaaactaaccttctcttcgctaaacacggcaaggacctgattacatattgtaaccgagaaaacattccctacaccgaattcaactcgttcgaagatatcctgtccaaggtcaccaagattgtcgaggccaagggcaaaaacatcaacgagttcctcgagaaccactaacacggatcaacaaaaatgtgcgccagctttgttgtgtgcccttttcctctagcggatcctatccacatttcgtgaatgaaccgattaagctctgacgagatttccttgttttctgtagatacctcttgtagaggtgtcaaagttatgttgtgatcgagagagttacctgcaaggtattatgcaagcggcttgatgaggacactcaactacgtgtgagtaggagtgcgttgctcagcagttgacgcgtgagccgcttgagcagcttgataaaggtcctaatcgtcttccagctgttggcagacgacaatgtgctgtagtagtaggataggcccgtaaaagtgtagaagcaataggttgagactgactgtaatgggtacttgcgttcaaagactgaaagtccaaaggattgctcaaaggcccctgaggtctgagcctctgagcgcgctcttcgtcaaaattcgccggggccatcggtcatcctctcgagggcagcatcttcctgcttgaagactgagtccgtctcaggcttgctggtcacattattgtcagtacctaccatgaagaattcaatattattttacattgtcaaccattacatggatcccatgttgtgcatagcctctatgtcatcctttggtcttttatgtctgtagcgtgctagtagtattcaagttgtagcactgctgtgaaacagtacgttcaagtagtgtgcagcagtacgttcagttagtggactggggcagcctcgccttcagcaaaggttaggtacatgagccagttgctcactcttgctttctacgaatcccataggctactttgccccctaaccgtgacgaccccctgtgtttgagaagtttgagtctttttacgttaccgtgaccaagcgagcagagtagaaactcttgaagttgtgtatgtaagaatacaaattgagaacacaaggttacctacctttatagttggtaaacagcaagcaataccagagattttcatcgcaacgtgactctatcattcactatattaagttgcacacggatgttgtacaacactacacgtaaaagagagaaaaatactaatgtcgatcgctcaggt

SEQ ID NO: 248 - DNA, 732 bp, synthetic construct
  source 1..732: mol_type = other DNA
atgtcgggtcccccggcaatcgtgtttacagactgggatggtactgttactttgcaggactccaatgactatctgactgagaatttgggatttggcaagcctcgacgcctggagattaacgatgagattttgaatgaacgcgtgtccttccaagagggattcacggagatgcttaaatccatccctacaccatttcccgagtgtatcgaataccttttgaaacacattcaactggaccctggatttaaggatttctatcactggtgttttgagcgtaacatcccagtgattgttatctcctccggtatgaaaccgatcatccacgcgttgctgaagaaccttgttggtgatgaagcaattaaaaacattgaaatcattagcaatgaagttgatgtcaaagcggatggctcttggaacatcgtttacaaggaccctgaaacctccttcggtcatgataagtctaaatccattcgcgagtatcttgagcgcaacggatactcctcccagaatgtgcctttgctgttttactgtggtgacggtgtgtccgacctctcggctgcgaaggaaactaaccttctcttcgctaaacacggcaaggacctgattacatattgtaaccgagaaaacattccctacaccgaattcaactcgttcgaagatatcctgtccaaggtcaccaagattgtcgaggccaagggcaaaaacatcaacgagttcctcgagaaccactaa

SEQ ID NO: 249 - DNA, 3796 bp, synthetic construct
  source 1..3796: mol_type = other DNA
agatgtagccggcgctgtagagttttggacggataggttgggtttcagtcgagacttcgttgaagatgactttgcaggcgtcgtgcgtgatgatgtgaccctgtttatctcggccgttcaagatcaagttgtccctgacaatacacttgcatgggtctgggtacgcggattagatgaattgtacgcggaatggtctgaagttgtatccactaactttcgtgacgcttcaggtcctgctatgactgagattggtgaacaaccctgggggcgtgagttcgcactccgagatccagctggaaattgtgttcatttcgtagctgaggaacaggattaatggtgttcaccactgttgcttcccctttgttggagcgtccgtcgttctgatggcgctctgagcccaaaatatcccttcttcgcccgagagcaagcctcggagtgtgcttgcaatctacttttcctactaaagttatcttcttgtggcttctgaatttgaatagaacgtgttcagacttgttagctaaatttgttgatgcgagatacttgacagaatcccgttgatgaactcatctgtgtgaccaccgcctggtgatggaatctcgcgcggaagccgtggtgttactgactctcaagcaattcagtagataaatttgtataacatcattgcaaggggtgctagcaatcaattgtccaataccaaacggcggcaagtgcaaaggggcgatagagagtttctgcgaggaagggaaggaatccgtatgcctgaaaacttttgtacaagtgtctttgtaagggcgaggtctgctctgacatctctctgagatctgagatctgatacctgcaggataacttcgtataatgtatgctatacgaagttatgtcacagtatcggcatctctgtctcgacgacagtgagtatagtcaactatgctatctagtagccaaagtaagtctacattccgggctttgcaggggttagctatttcattagacaatacttacaaccttcgaagggcttccccagaattcaattctatattgattcaatatccacccatcggacccgctctccgtaccccctgttcgcttcgccactacaaccatgtcaagacctgagaatcgtagcaaattgccccactacggcccgagtgctgtcggctggttaaagtagaatgacttgggtagccagatcgagacgcctgacattgatacgcagacagcgcagtcagtttcaaactgacaactgacgcgtactggattgacaggactccttggccggtgccattcgaatcgcttgtagacctcttgccagcatcttgccagagaagcttgaaggctggatcgctcagcctgagctcacacttagtagctccactagtcactcaggtgctcagcctctcctcagcgcctcaagctcaagcctcagggcctcagctgcatcgagctctggtgccagtgccagtgccagtgccagtgccagtgccagtgccagtgccagtgaagagagtggtatgagccaagctatacccaaaagcaaatgatggttattgccagcttccatgcacccctggggcgaaggacaacgaacaacagacagagtttgaattattcactggcctagtactaccaatttaaatttggtggttcagcgcaggaacggcgcgagtgagcgtaagggcaaactccgcatggggcgtgacgtcagtgtccctctggctgaggcactccagcaggctctggtcaacgcatcaacgtgtgtgtgtgtctaccaagcacattgtgcgctcgctgtccgtgcgccgaaatcgcaccagtcagaacgtctataaaacccctcttgcttggagggttaccgggccgtcttttcccaacgctccggctcactcactactctacacaacaaatgggctcgacgactacgacacttccagcaatgaagacctctccaaaatacgttttctttaccgacttcgatggcacaattacaacgcgtgactctaacgactttatgacggataacttgggcttcggtcaagaactgcgtaagcagggaaaccgcgatgtccttgacggacgcaagacgtttcgcgactcgttccagtcgatgatggacagcatcaaaaccccgtattctaaatgtattgagacgcttattgagaacattaaattggatccaggcttcaaagagttctacgagtgggcacgcgaaaacaacatcccggtggttattcttagcggcggcatggagcccattatccgagccctgctcgaacatctcctgggcaaaaaagaggcagcagaaatccagatcgtcagcaatcaagttgaggtgcgcaagggatttaagtccctggatgaagaaggtggttggaacattgtctatcacgatgagtcgcattttggccacgacaagtctcgcgaaattcgtccctatgcagagctgcctgatgaccagcgaccgactatgttttacgccggtgacggagtgtctgacctgtcggccgctaaagagacggacctgctgtttgcgaagaagggtcacgatctgatcacgtattgcgtccgagaaaaggttccatttactattttcgaggactggacgtcgattctttccactgtccaggacgtcgtggcaggaaaaaccacagtgaaggaagtgtacgcggccggaattaaggattttgaacaaggtgcagacaaggcctaacacggatcaacaaaaatgtgcgccagctttgttgtgtgcccttttcctctagcggatcctatccacatttcgtgaatgaaccgattaagctctgacgagatttccttgttttctgtagatacctcttgtagaggtgtcaaagttatgttgtgatcgagagagttacctgcaaggtattatgcaagcggcttgatgaggacactcaactacgtgtgagtaggagtgcgttgctcagcagttgacgcgtgagccgcttgagcagcttgataaaggtcctaatcgtcttccagctgttggcagacgacaatgtgctgtagtagtaggataggcccgtaaaagtgtagaagcaataggttgagactgactgtaatgggtacttgcgttcaaagactgaaagtccaaaggattgctcaaaggcccctgaggtctgagcctctgagcgcgctcttcgtcaaaattcgccggggccatcggtcatcctctcgagggcagcatcttcctgcttgaagactgagtccgtctcaggcttgctggtcacattattgtcagtacctaccatgaagaattcaatattattttacattgtcaaccattacatggatcccatgttgtgcatagcctctatgtcatcctttggtcttttatgtctgtagcgtgctagtagtattcaagttgtagcactgctgtgaaacagtacgttcaagtagtgtgcagcagtacgttcagttagtggactggggcagcctcgccttcagcaaaggttaggtacatgagccagttgctcactcttgctttctacgaatcccataggctactttgccccctaaccgtgacgaccccctgtgtttgagaagtttgagtctttttacgttaccgtgaccaagcgagcagagtagaaactcttgaagttgtgtatgtaagaatacaaattgagaacacaaggttacctacctttatagttggtaaacagcaagcaataccagagattttcatcgcaacgtgactctatcattcactatattaagttgcacacggatgttgtacaacactacacgtaaaagagagaaaaatactaatgtcgatcgctcaggt

SEQ ID NO: 250 - DNA, 804 bp, synthetic construct
  source 1..804: mol_type = other DNA
atgggctcgacgactacgacacttccagcaatgaagacctctccaaaatacgttttctttaccgacttcgatggcacaattacaacgcgtgactctaacgactttatgacggataacttgggcttcggtcaagaactgcgtaagcagggaaaccgcgatgtccttgacggacgcaagacgtttcgcgactcgttccagtcgatgatggacagcatcaaaaccccgtattctaaatgtattgagacgcttattgagaacattaaattggatccaggcttcaaagagttctacgagtgggcacgcgaaaacaacatcccggtggttattcttagcggcggcatggagcccattatccgagccctgctcgaacatctcctgggcaaaaaagaggcagcagaaatccagatcgtcagcaatcaagttgaggtgcgcaagggatttaagtccctggatgaagaaggtggttggaacattgtctatcacgatgagtcgcattttggccacgacaagtctcgcgaaattcgtccctatgcagagctgcctgatgaccagcgaccgactatgttttacgccggtgacggagtgtctgacctgtcggccgctaaagagacggacctgctgtttgcgaagaagggtcacgatctgatcacgtattgcgtccgagaaaaggttccatttactattttcgaggactggacgtcgattctttccactgtccaggacgtcgtggcaggaaaaaccacagtgaaggaagtgtacgcggccggaattaaggattttgaacaaggtgcagacaaggcctaa

SEQ ID NO: 251 - DNA, 3757 bp, synthetic construct
  source 1..3757: mol_type = other DNA
agatgtagccggcgctgtagagttttggacggataggttgggtttcagtcgagacttcgttgaagatgactttgcaggcgtcgtgcgtgatgatgtgaccctgtttatctcggccgttcaagatcaagttgtccctgacaatacacttgcatgggtctgggtacgcggattagatgaattgtacgcggaatggtctgaagttgtatccactaactttcgtgacgcttcaggtcctgctatgactgagattggtgaacaaccctgggggcgtgagttcgcactccgagatccagctggaaattgtgttcatttcgtagctgaggaacaggattaatggtgttcaccactgttgcttcccctttgttggagcgtccgtcgttctgatggcgctctgagcccaaaatatcccttcttcgcccgagagcaagcctcggagtgtgcttgcaatctacttttcctactaaagttatcttcttgtggcttctgaatttgaatagaacgtgttcagacttgttagctaaatttgttgatgcgagatacttgacagaatcccgttgatgaactcatctgtgtgaccaccgcctggtgatggaatctcgcgcggaagccgtggtgttactgactctcaagcaattcagtagataaatttgtataacatcattgcaaggggtgctagcaatcaattgtccaataccaaacggcggcaagtgcaaaggggcgatagagagtttctgcgaggaagggaaggaatccgtatgcctgaaaacttttgtacaagtgtctttgtaagggcgaggtctgctctgacatctctctgagatctgagatctgatacctgcaggataacttcgtataatgtatgctatacgaagttatgtcacagtatcggcatctctgtctcgacgacagtgagtatagtcaactatgctatctagtagccaaagtaagtctacattccgggctttgcaggggttagctatttcattagacaatacttacaaccttcgaagggcttccccagaattcaattctatattgattcaatatccacccatcggacccgctctccgtaccccctgttcgcttcgccactacaaccatgtcaagacctgagaatcgtagcaaattgccccactacggcccgagtgctgtcggctggttaaagtagaatgacttgggtagccagatcgagacgcctgacattgatacgcagacagcgcagtcagtttcaaactgacaactgacgcgtactggattgacaggactccttggccggtgccattcgaatcgcttgtagacctcttgccagcatcttgccagagaagcttgaaggctggatcgctcagcctgagctcacacttagtagctccactagtcactcaggtgctcagcctctcctcagcgcctcaagctcaagcctcagggcctcagctgcatcgagctctggtgccagtgccagtgccagtgccagtgccagtgccagtgccagtgccagtgaagagagtggtatgagccaagctatacccaaaagcaaatgatggttattgccagcttccatgcacccctggggcgaaggacaacgaacaacagacagagtttgaattattcactggcctagtactaccaatttaaatttggtggttcagcgcaggaacggcgcgagtgagcgtaagggcaaactccgcatggggcgtgacgtcagtgtccctctggctgaggcactccagcaggctctggtcaacgcatcaacgtgtgtgtgtgtctaccaagcacattgtgcgctcgctgtccgtgcgccgaaatcgcaccagtcagaacgtctataaaacccctcttgcttggagggttaccgggccgtcttttcccaacgctccggctcactcactactctacacaacaaatgggagattcctccttcctgtcgcttcccgccatgcaaacctctccacagtccatcgtgttcacagactgggacggaaccgttaccctggaggattctaacgattttttgacagataaccttggttatggtgtcgaacgtcgaaagtggcttaatcaacaggtccttgaaggaaaatggaccttccgcgactccttcatggatatgctccaatctatcaacactccattgccagaatgcatcgcctatttgaaacaacatgtgaagctcgaccccggctttttggctttctatacatggtgtaaaagccacaacattccggttattatcgtttcctcgggtatgactccaatcattcgcgcactgcttgaggatttggttggcatggacgcagccctcgacatccagattgtctccaatgatgttgcgattgacgacgcgggtaagtggaaaattgtctatcgagacgactcgccttttggccacgacaagtctcttgcaattaagccctacgctaatttggacccggcagtccgccctactctcttctactgtggtgacggagtctccgacctttctgccgctcgtgaaactgatcttttgttcgccaagaaaggccgcgacctggtcacttactgtgaacgtgagaacatcgcctacaatgtttttgattccttcgcagatatccataagcgtgtcaaggctattgttgaagacaatagcttgacgctcgaacaggcggttgctcagaaggagattttgtaacacggatcaacaaaaatgtgcgccagctttgttgtgtgcccttttcctctagcggatcctatccacatttcgtgaatgaaccgattaagctctgacgagatttccttgttttctgtagatacctcttgtagaggtgtcaaagttatgttgtgatcgagagagttacctgcaaggtattatgcaagcggcttgatgaggacactcaactacgtgtgagtaggagtgcgttgctcagcagttgacgcgtgagccgcttgagcagcttgataaaggtcctaatcgtcttccagctgttggcagacgacaatgtgctgtagtagtaggataggcccgtaaaagtgtagaagcaataggttgagactgactgtaatgggtacttgcgttcaaagactgaaagtccaaaggattgctcaaaggcccctgaggtctgagcctctgagcgcgctcttcgtcaaaattcgccggggccatcggtcatcctctcgagggcagcatcttcctgcttgaagactgagtccgtctcaggcttgctggtcacattattgtcagtacctaccatgaagaattcaatattattttacattgtcaaccattacatggatcccatgttgtgcatagcctctatgtcatcctttggtcttttatgtctgtagcgtgctagtagtattcaagttgtagcactgctgtgaaacagtacgttcaagtagtgtgcagcagtacgttcagttagtggactggggcagcctcgccttcagcaaaggttaggtacatgagccagttgctcactcttgctttctacgaatcccataggctactttgccccctaaccgtgacgaccccctgtgtttgagaagtttgagtctttttacgttaccgtgaccaagcgagcagagtagaaactcttgaagttgtgtatgtaagaatacaaattgagaacacaaggttacctacctttatagttggtaaacagcaagcaataccagagattttcatcgcaacgtgactctatcattcactatattaagttgcacacggatgttgtacaacactacacgtaaaagagagaaaaatactaatgtcgatcgctcaggt

SEQ ID NO: 252 - DNA, 765 bp, synthetic construct
  source 1..765: mol_type = other DNA
atgggagattcctccttcctgtcgcttcccgccatgcaaacctctccacagtccatcgtgttcacagactgggacggaaccgttaccctggaggattctaacgattttttgacagataaccttggttatggtgtcgaacgtcgaaagtggcttaatcaacaggtccttgaaggaaaatggaccttccgcgactccttcatggatatgctccaatctatcaacactccattgccagaatgcatcgcctatttgaaacaacatgtgaagctcgaccccggctttttggctttctatacatggtgtaaaagccacaacattccggttattatcgtttcctcgggtatgactccaatcattcgcgcactgcttgaggatttggttggcatggacgcagccctcgacatccagattgtctccaatgatgttgcgattgacgacgcgggtaagtggaaaattgtctatcgagacgactcgccttttggccacgacaagtctcttgcaattaagccctacgctaatttggacccggcagtccgccctactctcttctactgtggtgacggagtctccgacctttctgccgctcgtgaaactgatcttttgttcgccaagaaaggccgcgacctggtcacttactgtgaacgtgagaacatcgcctacaatgtttttgattccttcgcagatatccataagcgtgtcaaggctattgttgaagacaatagcttgacgctcgaacaggcggttgctcagaaggagattttgtaa

SEQ ID NO: 253 - DNA, 3628 bp, synthetic construct
  source 1..3628: mol_type = other DNA
agatgtagccggcgctgtagagttttggacggataggttgggtttcagtcgagacttcgttgaagatgactttgcaggcgtcgtgcgtgatgatgtgaccctgtttatctcggccgttcaagatcaagttgtccctgacaatacacttgcatgggtctgggtacgcggattagatgaattgtacgcggaatggtctgaagttgtatccactaactttcgtgacgcttcaggtcctgctatgactgagattggtgaacaaccctgggggcgtgagttcgcactccgagatccagctggaaattgtgttcatttcgtagctgaggaacaggattaatggtgttcaccactgttgcttcccctttgttggagcgtccgtcgttctgatggcgctctgagcccaaaatatcccttcttcgcccgagagcaagcctcggagtgtgcttgcaatctacttttcctactaaagttatcttcttgtggcttctgaatttgaatagaacgtgttcagacttgttagctaaatttgttgatgcgagatacttgacagaatcccgttgatgaactcatctgtgtgaccaccgcctggtgatggaatctcgcgcggaagccgtggtgttactgactctcaagcaattcagtagataaatttgtataacatcattgcaaggggtgctagcaatcaattgtccaataccaaacggcggcaagtgcaaaggggcgatagagagtttctgcgaggaagggaaggaatccgtatgcctgaaaacttttgtacaagtgtctttgtaagggcgaggtctgctctgacatctctctgagatctgagatctgatacctgcaggataacttcgtataatgtatgctatacgaagttatgtcacagtatcggcatctctgtctcgacgacagtgagtatagtcaactatgctatctagtagccaaagtaagtctacattccgggctttgcaggggttagctatttcattagacaatacttacaaccttcgaagggcttccccagaattcaattctatattgattcaatatccacccatcggacccgctctccgtaccccctgttcgcttcgccactacaaccatgtcaagacctgagaatcgtagcaaattgccccactacggcccgagtgctgtcggctggttaaagtagaatgacttgggtagccagatcgagacgcctgacattgatacgcagacagcgcagtcagtttcaaactgacaactgacgcgtactggattgacaggactccttggccggtgccattcgaatcgcttgtagacctcttgccagcatcttgccagagaagcttgaaggctggatcgctcagcctgagctcacacttagtagctccactagtcactcaggtgctcagcctctcctcagcgcctcaagctcaagcctcagggcctcagctgcatcgagctctggtgccagtgccagtgccagtgccagtgccagtgccagtgccagtgccagtgaagagagtggtatgagccaagctatacccaaaagcaaatgatggttattgccagcttccatgcacccctggggcgaaggacaacgaacaacagacagagtttgaattattcactggcctagtactaccaatttaaatttggtggttcagcgcaggaacggcgcgagtgagcgtaagggcaaactccgcatggggcgtgacgtcagtgtccctctggctgaggcactccagcaggctctggtcaacgcatcaacgtgtgtgtgtgtctaccaagcacattgtgcgctcgctgtccgtgcgccgaaatcgcaccagtcagaacgtctataaaacccctcttgcttggagggttaccgggccgtcttttcccaacgctccggctcactcactactctacacaacaaatgttgcttccatgtgacggcgtcctcttcgatgtggacggaacactcgttgactcgaccccacttattgagcgcgctgcgcgtgtgtgggctcccgaatatggcattgaccctgatgcctatttggcacgcgcacatggccgacgtacttccgatagcattgctgatttccttccagctggtcaagtgcgtgcggctactgaacgacttgatgctctggaagctgcggaggtggcaggtgtcaccgcccttccaggagttgtggacctcctttcttccctgcgaggactgccctgggccgttgtcacctccatggaccctggtcagctgacagcgcgcgctggcgctgcaggagttccccttcctaaagttgccgttactgcgcgcgatgtggccgccggtaaaccagaccctgctggttatctgctcgcagctcgacgactcggtctggaccctgctcgctgcgtcgttgtggaagatgctcctgccggagttgcagcgggtcgagccgctggcgcaaccgtggtcgctttgaccacgtctcatagccgagctgacttggcggaagctgacgttattgttcccgacctgaccgcggttactgctgagcctggcggcttgcgcgtgcgcgcgtaacacggatcaacaaaaatgtgcgccagctttgttgtgtgcccttttcctctagcggatcctatccacatttcgtgaatgaaccgattaagctctgacgagatttccttgttttctgtagatacctcttgtagaggtgtcaaagttatgttgtgatcgagagagttacctgcaaggtattatgcaagcggcttgatgaggacactcaactacgtgtgagtaggagtgcgttgctcagcagttgacgcgtgagccgcttgagcagcttgataaaggtcctaatcgtcttccagctgttggcagacgacaatgtgctgtagtagtaggataggcccgtaaaagtgtagaagcaataggttgagactgactgtaatgggtacttgcgttcaaagactgaaagtccaaaggattgctcaaaggcccctgaggtctgagcctctgagcgcgctcttcgtcaaaattcgccggggccatcggtcatcctctcgagggcagcatcttcctgcttgaagactgagtccgtctcaggcttgctggtcacattattgtcagtacctaccatgaagaattcaatattattttacattgtcaaccattacatggatcccatgttgtgcatagcctctatgtcatcctttggtcttttatgtctgtagcgtgctagtagtattcaagttgtagcactgctgtgaaacagtacgttcaagtagtgtgcagcagtacgttcagttagtggactggggcagcctcgccttcagcaaaggttaggtacatgagccagttgctcactcttgctttctacgaatcccataggctactttgccccctaaccgtgacgaccccctgtgtttgagaagtttgagtctttttacgttaccgtgaccaagcgagcagagtagaaactcttgaagttgtgtatgtaagaatacaaattgagaacacaaggttacctacctttatagttggtaaacagcaagcaataccagagattttcatcgcaacgtgactctatcattcactatattaagttgcacacggatgttgtacaacactacacgtaaaagagagaaaaatactaatgtcgatcgctcaggt

SEQ ID NO: 254 - DNA, 636 bp, synthetic construct
  source 1..636: mol_type = other DNA
atgttgcttccatgtgacggcgtcctcttcgatgtggacggaacactcgttgactcgaccccacttattgagcgcgctgcgcgtgtgtgggctcccgaatatggcattgaccctgatgcctatttggcacgcgcacatggccgacgtacttccgatagcattgctgatttccttccagctggtcaagtgcgtgcggctactgaacgacttgatgctctggaagctgcggaggtggcaggtgtcaccgcccttccaggagttgtggacctcctttcttccctgcgaggactgccctgggccgttgtcacctccatggaccctggtcagctgacagcgcgcgctggcgctgcaggagttccccttcctaaagttgccgttactgcgcgcgatgtggccgccggtaaaccagaccctgctggttatctgctcgcagctcgacgactcggtctggaccctgctcgctgcgtcgttgtggaagatgctcctgccggagttgcagcgggtcgagccgctggcgcaaccgtggtcgctttgaccacgtctcatagccgagctgacttggcggaagctgacgttattgttcccgacctgaccgcggttactgctgagcctggcggcttgcgcgtgcgcgcgtaa

SEQ ID NO: 255 - DNA, 3643 bp, synthetic construct
  source 1..3643: mol_type = other DNA
agatgtagccggcgctgtagagttttggacggataggttgggtttcagtcgagacttcgttgaagatgactttgcaggcgtcgtgcgtgatgatgtgaccctgtttatctcggccgttcaagatcaagttgtccctgacaatacacttgcatgggtctgggtacgcggattagatgaattgtacgcggaatggtctgaagttgtatccactaactttcgtgacgcttcaggtcctgctatgactgagattggtgaacaaccctgggggcgtgagttcgcactccgagatccagctggaaattgtgttcatttcgtagctgaggaacaggattaatggtgttcaccactgttgcttcccctttgttggagcgtccgtcgttctgatggcgctctgagcccaaaatatcccttcttcgcccgagagcaagcctcggagtgtgcttgcaatctacttttcctactaaagttatcttcttgtggcttctgaatttgaatagaacgtgttcagacttgttagctaaatttgttgatgcgagatacttgacagaatcccgttgatgaactcatctgtgtgaccaccgcctggtgatggaatctcgcgcggaagccgtggtgttactgactctcaagcaattcagtagataaatttgtataacatcattgcaaggggtgctagcaatcaattgtccaataccaaacggcggcaagtgcaaaggggcgatagagagtttctgcgaggaagggaaggaatccgtatgcctgaaaacttttgtacaagtgtctttgtaagggcgaggtctgctctgacatctctctgagatctgagatctgatacctgcaggataacttcgtataatgtatgctatacgaagttatgtcacagtatcggcatctctgtctcgacgacagtgagtatagtcaactatgctatctagtagccaaagtaagtctacattccgggctttgcaggggttagctatttcattagacaatacttacaaccttcgaagggcttccccagaattcaattctatattgattcaatatccacccatcggacccgctctccgtaccccctgttcgcttcgccactacaaccatgtcaagacctgagaatcgtagcaaattgccccactacggcccgagtgctgtcggctggttaaagtagaatgacttgggtagccagatcgagacgcctgacattgatacgcagacagcgcagtcagtttcaaactgacaactgacgcgtactggattgacaggactccttggccggtgccattcgaatcgcttgtagacctcttgccagcatcttgccagagaagcttgaaggctggatcgctcagcctgagctcacacttagtagctccactagtcactcaggtgctcagcctctcctcagcgcctcaagctcaagcctcagggcctcagctgcatcgagctctggtgccagtgccagtgccagtgccagtgccagtgccagtgccagtgccagtgaagagagtggtatgagccaagctatacccaaaagcaaatgatggttattgccagcttccatgcacccctggggcgaaggacaacgaacaacagacagagtttgaattattcactggcctagtactaccaatttaaatttggtggttcagcgcaggaacggcgcgagtgagcgtaagggcaaactccgcatggggcgtgacgtcagtgtccctctggctgaggcactccagcaggctctggtcaacgcatcaacgtgtgtgtgtgtctaccaagcacattgtgcgctcgctgtccgtgcgccgaaatcgcaccagtcagaacgtctataaaacccctcttgcttggagggttaccgggccgtcttttcccaacgctccggctcactcactactctacacaacaaatgcgctgtaaaggctttcttttcgacttggacggtacgttggtcgactcgctgcccgcagtcgagcgagcgtggtctaattgggctcgacgacatggacttgcgcccgaagaagtcctcgcatttattcatggaaaacaggctattacgtcgttgcgtcactttatggcaggaaagtccgaagcggacatcgctgccgaatttacccgcttggagcacatcgaggcaactgagactgaaggtattactgcgttgccaggcgctattgcactgctttcccatctcaataaggctggcattccatgggccatcgttacttctggttcgatgcctgtggcccgcgcccgccataagatcgctggactgcccgcaccagaggttttcgttacggccgaacgagtcaaacgcggtaagcccgagcccgatgcctatctcctcggtgcacaattgcttggcttggcgccacaggagtgtgtggtggtcgaggatgcacccgcgggtgtcctctctggactggccgctggttgccacgtcatcgcagtgaacgcaccagcggatacaccccgcctgaatgaagttgatttggtgctccattccctggaacagatcacagtcacgaagcagcctaatggcgacgtgattattcaataacacggatcaacaaaaatgtgcgccagctttgttgtgtgcccttttcctctagcggatcctatccacatttcgtgaatgaaccgattaagctctgacgagatttccttgttttctgtagatacctcttgtagaggtgtcaaagttatgttgtgatcgagagagttacctgcaaggtattatgcaagcggcttgatgaggacactcaactacgtgtgagtaggagtgcgttgctcagcagttgacgcgtgagccgcttgagcagcttgataaaggtcctaatcgtcttccagctgttggcagacgacaatgtgctgtagtagtaggataggcccgtaaaagtgtagaagcaataggttgagactgactgtaatgggtacttgcgttcaaagactgaaagtccaaaggattgctcaaaggcccctgaggtctgagcctctgagcgcgctcttcgtcaaaattcgccggggccatcggtcatcctctcgagggcagcatcttcctgcttgaagactgagtccgtctcaggcttgctggtcacattattgtcagtacctaccatgaagaattcaatattattttacattgtcaaccattacatggatcccatgttgtgcatagcctctatgtcatcctttggtcttttatgtctgtagcgtgctagtagtattcaagttgtagcactgctgtgaaacagtacgttcaagtagtgtgcagcagtacgttcagttagtggactggggcagcctcgccttcagcaaaggttaggtacatgagccagttgctcactcttgctttctacgaatcccataggctactttgccccctaaccgtgacgaccccctgtgtttgagaagtttgagtctttttacgttaccgtgaccaagcgagcagagtagaaactcttgaagttgtgtatgtaagaatacaaattgagaacacaaggttacctacctttatagttggtaaacagcaagcaataccagagattttcatcgcaacgtgactctatcattcactatattaagttgcacacggatgttgtacaacactacacgtaaaagagagaaaaatactaatgtcgatcgctcaggt

SEQ ID NO: 256 - DNA, 651 bp, synthetic construct
  source 1..651: mol_type = other DNA
atgcgctgtaaaggctttcttttcgacttggacggtacgttggtcgactcgctgcccgcagtcgagcgagcgtggtctaattgggctcgacgacatggacttgcgcccgaagaagtcctcgcatttattcatggaaaacaggctattacgtcgttgcgtcactttatggcaggaaagtccgaagcggacatcgctgccgaatttacccgcttggagcacatcgaggcaactgagactgaaggtattactgcgttgccaggcgctattgcactgctttcccatctcaataaggctggcattccatgggccatcgttacttctggttcgatgcctgtggcccgcgcccgccataagatcgctggactgcccgcaccagaggttttcgttacggccgaacgagtcaaacgcggtaagcccgagcccgatgcctatctcctcggtgcacaattgcttggcttggcgccacaggagtgtgtggtggtcgaggatgcacccgcgggtgtcctctctggactggccgctggttgccacgtcatcgcagtgaacgcaccagcggatacaccccgcctgaatgaagttgatttggtgctccattccctggaacagatcacagtcacgaagcagcctaatggcgacgtgattattcaataa

SEQ ID NO: 257 - DNA, 3688 bp, synthetic construct
  source 1..3688: mol_type = other DNA
agatgtagccggcgctgtagagttttggacggataggttgggtttcagtcgagacttcgttgaagatgactttgcaggcgtcgtgcgtgatgatgtgaccctgtttatctcggccgttcaagatcaagttgtccctgacaatacacttgcatgggtctgggtacgcggattagatgaattgtacgcggaatggtctgaagttgtatccactaactttcgtgacgcttcaggtcctgctatgactgagattggtgaacaaccctgggggcgtgagttcgcactccgagatccagctggaaattgtgttcatttcgtagctgaggaacaggattaatggtgttcaccactgttgcttcccctttgttggagcgtccgtcgttctgatggcgctctgagcccaaaatatcccttcttcgcccgagagcaagcctcggagtgtgcttgcaatctacttttcctactaaagttatcttcttgtggcttctgaatttgaatagaacgtgttcagacttgttagctaaatttgttgatgcgagatacttgacagaatcccgttgatgaactcatctgtgtgaccaccgcctggtgatggaatctcgcgcggaagccgtggtgttactgactctcaagcaattcagtagataaatttgtataacatcattgcaaggggtgctagcaatcaattgtccaataccaaacggcggcaagtgcaaaggggcgatagagagtttctgcgaggaagggaaggaatccgtatgcctgaaaacttttgtacaagtgtctttgtaagggcgaggtctgctctgacatctctctgagatctgagatctgatacctgcaggataacttcgtataatgtatgctatacgaagttatgtcacagtatcggcatctctgtctcgacgacagtgagtatagtcaactatgctatctagtagccaaagtaagtctacattccgggctttgcaggggttagctatttcattagacaatacttacaaccttcgaagggcttccccagaattcaattctatattgattcaatatccacccatcggacccgctctccgtaccccctgttcgcttcgccactacaaccatgtcaagacctgagaatcgtagcaaattgccccactacggcccgagtgctgtcggctggttaaagtagaatgacttgggtagccagatcgagacgcctgacattgatacgcagacagcgcagtcagtttcaaactgacaactgacgcgtactggattgacaggactccttggccggtgccattcgaatcgcttgtagacctcttgccagcatcttgccagagaagcttgaaggctggatcgctcagcctgagctcacacttagtagctccactagtcactcaggtgctcagcctctcctcagcgcctcaagctcaagcctcagggcctcagctgcatcgagctctggtgccagtgccagtgccagtgccagtgccagtgccagtgccagtgccagtgaagagagtggtatgagccaagctatacccaaaagcaaatgatggttattgccagcttccatgcacccctggggcgaaggacaacgaacaacagacagagtttgaattattcactggcctagtactaccaatttaaatttggtggttcagcgcaggaacggcgcgagtgagcgtaagggcaaactccgcatggggcgtgacgtcagtgtccctctggctgaggcactccagcaggctctggtcaacgcatcaacgtgtgtgtgtgtctaccaagcacattgtgcgctcgctgtccgtgcgccgaaatcgcaccagtcagaacgtctataaaacccctcttgcttggagggttaccgggccgtcttttcccaacgctccggctcactcactactctacacaacaaatgtccaagtcgatcacattggacgcagacatcatcgaatttgaccttgacggaacccttgtttacacaacgtctgtggtcgaaaaactctggtcggaacttgcgatccaacatggtgtcgatcctcatactgttctgaacgactcgcacggcgcccgcacatccgaaacctttgctaagtatttcccgatgattgacaatacggataataaagcagtggaaaagttcgaaaaagacatccctgataattacggacatttggttaaaattatcccaggcactattgagttgctgaatggtattgacaaagaccgttggtgtatcgtgacctcgggctccaattacattgctaactcctggtttaacggcattttgaaagacgtgcagaaaccgaaggtttttattaccgccgagttggtgaccaatggcaaaccagatcctgagggatatctcaaaggagataaaatcttgtccgagtccctcggtatcacttccgaacacaaaaagatcgtttttgaggacgcgcccatgggtgtcaaagctggcgttgcttccggcgcaattgtcatcggtgtgaatagcggcaataacgctaagttgctgtatgagtccggcgccagctatgtcgttaaagaccttacagacatcaaagttctggatgctaacaaagtttccctggaagttcgatacgattaacacggatcaacaaaaatgtgcgccagctttgttgtgtgcccttttcctctagcggatcctatccacatttcgtgaatgaaccgattaagctctgacgagatttccttgttttctgtagatacctcttgtagaggtgtcaaagttatgttgtgatcgagagagttacctgcaaggtattatgcaagcggcttgatgaggacactcaactacgtgtgagtaggagtgcgttgctcagcagttgacgcgtgagccgcttgagcagcttgataaaggtcctaatcgtcttccagctgttggcagacgacaatgtgctgtagtagtaggataggcccgtaaaagtgtagaagcaataggttgagactgactgtaatgggtacttgcgttcaaagactgaaagtccaaaggattgctcaaaggcccctgaggtctgagcctctgagcgcgctcttcgtcaaaattcgccggggccatcggtcatcctctcgagggcagcatcttcctgcttgaagactgagtccgtctcaggcttgctggtcacattattgtcagtacctaccatgaagaattcaatattattttacattgtcaaccattacatggatcccatgttgtgcatagcctctatgtcatcctttggtcttttatgtctgtagcgtgctagtagtattcaagttgtagcactgctgtgaaacagtacgttcaagtagtgtgcagcagtacgttcagttagtggactggggcagcctcgccttcagcaaaggttaggtacatgagccagttgctcactcttgctttctacgaatcccataggctactttgccccctaaccgtgacgaccccctgtgtttgagaagtttgagtctttttacgttaccgtgaccaagcgagcagagtagaaactcttgaagttgtgtatgtaagaatacaaattgagaacacaaggttacctacctttatagttggtaaacagcaagcaataccagagattttcatcgcaacgtgactctatcattcactatattaagttgcacacggatgttgtacaacactacacgtaaaagagagaaaaatactaatgtcgatcgctcaggt

SEQ ID NO: 258 - DNA, 696 bp, synthetic construct
  source 1..696: mol_type = other DNA
atgtccaagtcgatcacattggacgcagacatcatcgaatttgaccttgacggaacccttgtttacacaacgtctgtggtcgaaaaactctggtcggaacttgcgatccaacatggtgtcgatcctcatactgttctgaacgactcgcacggcgcccgcacatccgaaacctttgctaagtatttcccgatgattgacaatacggataataaagcagtggaaaagttcgaaaaagacatccctgataattacggacatttggttaaaattatcccaggcactattgagttgctgaatggtattgacaaagaccgttggtgtatcgtgacctcgggctccaattacattgctaactcctggtttaacggcattttgaaagacgtgcagaaaccgaaggtttttattaccgccgagttggtgaccaatggcaaaccagatcctgagggatatctcaaaggagataaaatcttgtccgagtccctcggtatcacttccgaacacaaaaagatcgtttttgaggacgcgcccatgggtgtcaaagctggcgttgcttccggcgcaattgtcatcggtgtgaatagcggcaataacgctaagttgctgtatgagtccggcgccagctatgtcgttaaagaccttacagacatcaaagttctggatgctaacaaagtttccctggaagttcgatacgattaa

SEQ ID NO: 259 - DNA, 3736 bp, synthetic construct
  source 1..3736: mol_type = other DNA
agatgtagccggcgctgtagagttttggacggataggttgggtttcagtcgagacttcgttgaagatgactttgcaggcgtcgtgcgtgatgatgtgaccctgtttatctcggccgttcaagatcaagttgtccctgacaatacacttgcatgggtctgggtacgcggattagatgaattgtacgcggaatggtctgaagttgtatccactaactttcgtgacgcttcaggtcctgctatgactgagattggtgaacaaccctgggggcgtgagttcgcactccgagatccagctggaaattgtgttcatttcgtagctgaggaacaggattaatggtgttcaccactgttgcttcccctttgttggagcgtccgtcgttctgatggcgctctgagcccaaaatatcccttcttcgcccgagagcaagcctcggagtgtgcttgcaatctacttttcctactaaagttatcttcttgtggcttctgaatttgaatagaacgtgttcagacttgttagctaaatttgttgatgcgagatacttgacagaatcccgttgatgaactcatctgtgtgaccaccgcctggtgatggaatctcgcgcggaagccgtggtgttactgactctcaagcaattcagtagataaatttgtataacatcattgcaaggggtgctagcaatcaattgtccaataccaaacggcggcaagtgcaaaggggcgatagagagtttctgcgaggaagggaaggaatccgtatgcctgaaaacttttgtacaagtgtctttgtaagggcgaggtctgctctgacatctctctgagatctgagatctgatacctgcaggataacttcgtataatgtatgctatacgaagttatgtcacagtatcggcatctctgtctcgacgacagtgagtatagtcaactatgctatctagtagccaaagtaagtctacattccgggctttgcaggggttagctatttcattagacaatacttacaaccttcgaagggcttccccagaattcaattctatattgattcaatatccacccatcggacccgctctccgtaccccctgttcgcttcgccactacaaccatgtcaagacctgagaatcgtagcaaattgccccactacggcccgagtgctgtcggctggttaaagtagaatgacttgggtagccagatcgagacgcctgacattgatacgcagacagcgcagtcagtttcaaactgacaactgacgcgtactggattgacaggactccttggccggtgccattcgaatcgcttgtagacctcttgccagcatcttgccagagaagcttgaaggctggatcgctcagcctgagctcacacttagtagctccactagtcactcaggtgctcagcctctcctcagcgcctcaagctcaagcctcagggcctcagctgcatcgagctctggtgccagtgccagtgccagtgccagtgccagtgccagtgccagtgccagtgaagagagtggtatgagccaagctatacccaaaagcaaatgatggttattgccagcttccatgcacccctggggcgaaggacaacgaacaacagacagagtttgaattattcactggcctagtactaccaatttaaatttggtggttcagcgcaggaacggcgcgagtgagcgtaagggcaaactccgcatggggcgtgacgtcagtgtccctctggctgaggcactccagcaggctctggtcaacgcatcaacgtgtgtgtgtgtctaccaagcacattgtgcgctcgctgtccgtgcgccgaaatcgcaccagtcagaacgtctataaaacccctcttgcttggagggttaccgggccgtcttttcccaacgctccggctcactcactactctacacaacaaatgccgcaattttcagtagacctctgcctctttgacttggatggcacgatcgtgtcgaccaccaccgccgctgagagcgcgtggaaaaagctgtgcagacagcatggtgtcgacccagtcgagctgttcaagcattcacacggcgcccgcagccaggagatgatgaaaaagttctttccaaagctcgacaataccgataacaagggtgtgcttgccctcgaaaaagatatcgcacactcttacttggatacagtcagtctcattcccggtgctgagaatcttttgctgtccctagacgtggataccgagactcagaaaaagctccctgagcgaaagtgggccattgtcacaagcggatcgccttacctggcgttttcctggttcgaaacgatcttgaaaaacgtcggcaagcccaaggtattcatcaccggtttcgacgtgaaaaacggtaagccagatcctgagggctattcgcgggctcgtgaccttctgaggcaagacctccagctcacgggcaagcaagatctgaaatacgtcgttttcgaagatgctccggtcggcattaaggccggcaaggcaatgggcgcgatcactgtcgggatcacgagctcttacgacaagtccgttcttttcgacgccggagcagactacgttgtgtgtgacctcacacaagtctcggttgtgaaaaacaacgaaaacggaatcgtcatccaggtgaataaccccctcactcgcgactaataacacggatcaacaaaaatgtgcgccagctttgttgtgtgcccttttcctctagcggatcctatccacatttcgtgaatgaaccgattaagctctgacgagatttccttgttttctgtagatacctcttgtagaggtgtcaaagttatgttgtgatcgagagagttacctgcaaggtattatgcaagcggcttgatgaggacactcaactacgtgtgagtaggagtgcgttgctcagcagttgacgcgtgagccgcttgagcagcttgataaaggtcctaatcgtcttccagctgttggcagacgacaatgtgctgtagtagtaggataggcccgtaaaagtgtagaagcaataggttgagactgactgtaatgggtacttgcgttcaaagactgaaagtccaaaggattgctcaaaggcccctgaggtctgagcctctgagcgcgctcttcgtcaaaattcgccggggccatcggtcatcctctcgagggcagcatcttcctgcttgaagactgagtccgtctcaggcttgctggtcacattattgtcagtacctaccatgaagaattcaatattattttacattgtcaaccattacatggatcccatgttgtgcatagcctctatgtcatcctttggtcttttatgtctgtagcgtgctagtagtattcaagttgtagcactgctgtgaaacagtacgttcaagtagtgtgcagcagtacgttcagttagtggactggggcagcctcgccttcagcaaaggttaggtacatgagccagttgctcactcttgctttctacgaatcccataggctactttgccccctaaccgtgacgaccccctgtgtttgagaagtttgagtctttttacgttaccgtgaccaagcgagcagagtagaaactcttgaagttgtgtatgtaagaatacaaattgagaacacaaggttacctacctttatagttggtaaacagcaagcaataccagagattttcatcgcaacgtgactctatcattcactatattaagttgcacacggatgttgtacaacactacacgtaaaagagagaaaaatactaatgtcgatcgctcaggt

SEQ ID NO: 260 - DNA, 744 bp, synthetic construct
  source 1..744: mol_type = other DNA
atgccgcaattttcagtagacctctgcctctttgacttggatggcacgatcgtgtcgaccaccaccgccgctgagagcgcgtggaaaaagctgtgcagacagcatggtgtcgacccagtcgagctgttcaagcattcacacggcgcccgcagccaggagatgatgaaaaagttctttccaaagctcgacaataccgataacaagggtgtgcttgccctcgaaaaagatatcgcacactcttacttggatacagtcagtctcattcccggtgctgagaatcttttgctgtccctagacgtggataccgagactcagaaaaagctccctgagcgaaagtgggccattgtcacaagcggatcgccttacctggcgttttcctggttcgaaacgatcttgaaaaacgtcggcaagcccaaggtattcatcaccggtttcgacgtgaaaaacggtaagccagatcctgagggctattcgcgggctcgtgaccttctgaggcaagacctccagctcacgggcaagcaagatctgaaatacgtcgttttcgaagatgctccggtcggcattaaggccggcaaggcaatgggcgcgatcactgtcgggatcacgagctcttacgacaagtccgttcttttcgacgccggagcagactacgttgtgtgtgacctcacacaagtctcggttgtgaaaaacaacgaaaacggaatcgtcatccaggtgaataaccccctcactcgcgactaataa

SEQ ID NO: 261 - DNA, 3883 bp, synthetic construct
  source 1..3883: mol_type = other DNA
agatgtagccggcgctgtagagttttggacggataggttgggtttcagtcgagacttcgttgaagatgactttgcaggcgtcgtgcgtgatgatgtgaccctgtttatctcggccgttcaagatcaagttgtccctgacaatacacttgcatgggtctgggtacgcggattagatgaattgtacgcggaatggtctgaagttgtatccactaactttcgtgacgcttcaggtcctgctatgactgagattggtgaacaaccctgggggcgtgagttcgcactccgagatccagctggaaattgtgttcatttcgtagctgaggaacaggattaatggtgttcaccactgttgcttcccctttgttggagcgtccgtcgttctgatggcgctctgagcccaaaatatcccttcttcgcccgagagcaagcctcggagtgtgcttgcaatctacttttcctactaaagttatcttcttgtggcttctgaatttgaatagaacgtgttcagacttgttagctaaatttgttgatgcgagatacttgacagaatcccgttgatgaactcatctgtgtgaccaccgcctggtgatggaatctcgcgcggaagccgtggtgttactgactctcaagcaattcagtagataaatttgtataacatcattgcaaggggtgctagcaatcaattgtccaataccaaacggcggcaagtgcaaaggggcgatagagagtttctgcgaggaagggaaggaatccgtatgcctgaaaacttttgtacaagtgtctttgtaagggcgaggtctgctctgacatctctctgagatctgagatctgatacctgcaggataacttcgtataatgtatgctatacgaagttatgtcacagtatcggcatctctgtctcgacgacagtgagtatagtcaactatgctatctagtagccaaagtaagtctacattccgggctttgcaggggttagctatttcattagacaatacttacaaccttcgaagggcttccccagaattcaattctatattgattcaatatccacccatcggacccgctctccgtaccccctgttcgcttcgccactacaaccatgtcaagacctgagaatcgtagcaaattgccccactacggcccgagtgctgtcggctggttaaagtagaatgacttgggtagccagatcgagacgcctgacattgatacgcagacagcgcagtcagtttcaaactgacaactgacgcgtactggattgacaggactccttggccggtgccattcgaatcgcttgtagacctcttgccagcatcttgccagagaagcttgaaggctggatcgctcagcctgagctcacacttagtagctccactagtcactcaggtgctcagcctctcctcagcgcctcaagctcaagcctcagggcctcagctgcatcgagctctggtgccagtgccagtgccagtgccagtgccagtgccagtgccagtgccagtgaagagagtggtatgagccaagctatacccaaaagcaaatgatggttattgccagcttccatgcacccctggggcgaaggacaacgaacaacagacagagtttgaattattcactggcctagtactaccaatttaaatttggtggttcagcgcaggaacggcgcgagtgagcgtaagggcaaactccgcatggggcgtgacgtcagtgtccctctggctgaggcactccagcaggctctggtcaacgcatcaacgtgtgtgtgtgtctaccaagcacattgtgcgctcgctgtccgtgcgccgaaatcgcaccagtcagaacgtctataaaacccctcttgcttggagggttaccgggccgtcttttcccaacgctccggctcactcactactctacacaacaaatgacgatcgagattgcgacgaaacagcaggtcgaggatctgatcgccaagtacgactacttcttgtttgattgcgacggcgttatctggttgggcgatcatctgctcccctccgtcccggagactctggcgttgctcaagaaacacaacaaacaaattatcttcgttacaaacaactcgacaaagtcccgaaacgattatctcactaaattcgaaaagcttggcattccgggaattactaaagatgaagtttttggcagcagctacgcaagcgcggtgtatgtcgataagattttgaaactgcctaaagacaagaaagtttgggtcttgggcgaaaagggcatcgaaacagaattgaaagaattcggatacacaaccgttggcggtacggacccatcgctctccacaactggtgcatttgatgccaacgataagcgtcttgaaaatctcgacgatgatgtcggctgtgtggtggcaggcttgctttttgatattaactatctcaagctttcgttgactctccagtacctgctgaaaaagcttccttttgtggctacaaacatcgattctaccttcccctccaaaggcaagctgttgatcggagctggctctattatcgaaagcgttgcgtttgccagcggtcgccaaccagacgcaatctgtggaaagccgaatcaatctatgatggactcgattaaggcggctttccccggactggccgcgaatccttctcgcggcttgatggtgggcgaccgattgaataccgatatgaaattcggcaaggacggcggtcttgatacacttctcgttctgaccggaatcgagaaaaaatccgacggttctaccacttacgtcaccaacaaacttggtgatcttgctgagttgctgtaacacggatcaacaaaaatgtgcgccagctttgttgtgtgcccttttcctctagcggatcctatccacatttcgtgaatgaaccgattaagctctgacgagatttccttgttttctgtagatacctcttgtagaggtgtcaaagttatgttgtgatcgagagagttacctgcaaggtattatgcaagcggcttgatgaggacactcaactacgtgtgagtaggagtgcgttgctcagcagttgacgcgtgagccgcttgagcagcttgataaaggtcctaatcgtcttccagctgttggcagacgacaatgtgctgtagtagtaggataggcccgtaaaagtgtagaagcaataggttgagactgactgtaatgggtacttgcgttcaaagactgaaagtccaaaggattgctcaaaggcccctgaggtctgagcctctgagcgcgctcttcgtcaaaattcgccggggccatcggtcatcctctcgagggcagcatcttcctgcttgaagactgagtccgtctcaggcttgctggtcacattattgtcagtacctaccatgaagaattcaatattattttacattgtcaaccattacatggatcccatgttgtgcatagcctctatgtcatcctttggtcttttatgtctgtagcgtgctagtagtattcaagttgtagcactgctgtgaaacagtacgttcaagtagtgtgcagcagtacgttcagttagtggactggggcagcctcgccttcagcaaaggttaggtacatgagccagttgctcactcttgctttctacgaatcccataggctactttgccccctaaccgtgacgaccccctgtgtttgagaagtttgagtctttttacgttaccgtgaccaagcgagcagagtagaaactcttgaagttgtgtatgtaagaatacaaattgagaacacaaggttacctacctttatagttggtaaacagcaagcaataccagagattttcatcgcaacgtgactctatcattcactatattaagttgcacacggatgttgtacaacactacacgtaaaagagagaaaaatactaatgtcgatcgctcaggt

SEQ ID NO: 262 - DNA, 891 bp, synthetic construct
  source 1..891: mol_type = other DNA
atgacgatcgagattgcgacgaaacagcaggtcgaggatctgatcgccaagtacgactacttcttgtttgattgcgacggcgttatctggttgggcgatcatctgctcccctccgtcccggagactctggcgttgctcaagaaacacaacaaacaaattatcttcgttacaaacaactcgacaaagtcccgaaacgattatctcactaaattcgaaaagcttggcattccgggaattactaaagatgaagtttttggcagcagctacgcaagcgcggtgtatgtcgataagattttgaaactgcctaaagacaagaaagtttgggtcttgggcgaaaagggcatcgaaacagaattgaaagaattcggatacacaaccgttggcggtacggacccatcgctctccacaactggtgcatttgatgccaacgataagcgtcttgaaaatctcgacgatgatgtcggctgtgtggtggcaggcttgctttttgatattaactatctcaagctttcgttgactctccagtacctgctgaaaaagcttccttttgtggctacaaacatcgattctaccttcccctccaaaggcaagctgttgatcggagctggctctattatcgaaagcgttgcgtttgccagcggtcgccaaccagacgcaatctgtggaaagccgaatcaatctatgatggactcgattaaggcggctttccccggactggccgcgaatccttctcgcggcttgatggtgggcgaccgattgaataccgatatgaaattcggcaaggacggcggtcttgatacacttctcgttctgaccggaatcgagaaaaaatccgacggttctaccacttacgtcaccaacaaacttggtgatcttgctgagttgctgtaa

SEQ ID NO: 263 - DNA, 3559 bp, synthetic construct
  source 1..3559: mol_type = other DNA
agatgtagccggcgctgtagagttttggacggataggttgggtttcagtcgagacttcgttgaagatgactttgcaggcgtcgtgcgtgatgatgtgaccctgtttatctcggccgttcaagatcaagttgtccctgacaatacacttgcatgggtctgggtacgcggattagatgaattgtacgcggaatggtctgaagttgtatccactaactttcgtgacgcttcaggtcctgctatgactgagattggtgaacaaccctgggggcgtgagttcgcactccgagatccagctggaaattgtgttcatttcgtagctgaggaacaggattaatggtgttcaccactgttgcttcccctttgttggagcgtccgtcgttctgatggcgctctgagcccaaaatatcccttcttcgcccgagagcaagcctcggagtgtgcttgcaatctacttttcctactaaagttatcttcttgtggcttctgaatttgaatagaacgtgttcagacttgttagctaaatttgttgatgcgagatacttgacagaatcccgttgatgaactcatctgtgtgaccaccgcctggtgatggaatctcgcgcggaagccgtggtgttactgactctcaagcaattcagtagataaatttgtataacatcattgcaaggggtgctagcaatcaattgtccaataccaaacggcggcaagtgcaaaggggcgatagagagtttctgcgaggaagggaaggaatccgtatgcctgaaaacttttgtacaagtgtctttgtaagggcgaggtctgctctgacatctctctgagatctgagatctgatacctgcaggataacttcgtataatgtatgctatacgaagttatgtcacagtatcggcatctctgtctcgacgacagtgagtatagtcaactatgctatctagtagccaaagtaagtctacattccgggctttgcaggggttagctatttcattagacaatacttacaaccttcgaagggcttccccagaattcaattctatattgattcaatatccacccatcggacccgctctccgtaccccctgttcgcttcgccactacaaccatgtcaagacctgagaatcgtagcaaattgccccactacggcccgagtgctgtcggctggttaaagtagaatgacttgggtagccagatcgagacgcctgacattgatacgcagacagcgcagtcagtttcaaactgacaactgacgcgtactggattgacaggactccttggccggtgccattcgaatcgcttgtagacctcttgccagcatcttgccagagaagcttgaaggctggatcgctcagcctgagctcacacttagtagctccactagtcactcaggtgctcagcctctcctcagcgcctcaagctcaagcctcagggcctcagctgcatcgagctctggtgccagtgccagtgccagtgccagtgccagtgccagtgccagtgccagtgaagagagtggtatgagccaagctatacccaaaagcaaatgatggttattgccagcttccatgcacccctggggcgaaggacaacgaacaacagacagagtttgaattattcactggcctagtactaccaatttaaatttggtggttcagcgcaggaacggcgcgagtgagcgtaagggcaaactccgcatggggcgtgacgtcagtgtccctctggctgaggcactccagcaggctctggtcaacgcatcaacgtgtgtgtgtgtctaccaagcacattgtgcgctcgctgtccgtgcgccgaaatcgcaccagtcagaacgtctataaaacccctcttgcttggagggttaccgggccgtcttttcccaacgctccggctcactcactactctacacaacaaatgaagaagcccattatcgccgtggatatggacgacacaatttgccatctcgtccgacgtgccatttatcataacaatatcaattttccaacacacccccttcgatatgaggatatgacgcattgggatacgtcccatctgcgccaccctgaatccacgcatgatgttttttacggacgacccggcttgtttgaggagctggaattgtacgacgagtacgtcgtggacgagatgcagaaacttaatgaagcctacgacgttatcattgtcaccgccgccgaccctaaaactgttgtcgagaagtggaactggctccagcgccacatgccgtttattaccgccgagcagtttattacgtgcaaacgaaagaatctcatcaacttcgatttgctgatcgatgatggtgcccataatctcatcccagcatggaaagctggtaaaaaagttatctgcatcccgcacccgtggaacggttccgaacgcgaacagtaccctttcccgctcatgtcgagctggaagggcgctaaggcatacatcgatgacctgttcgaaactgcctccggataacacggatcaacaaaaatgtgcgccagctttgttgtgtgcccttttcctctagcggatcctatccacatttcgtgaatgaaccgattaagctctgacgagatttccttgttttctgtagatacctcttgtagaggtgtcaaagttatgttgtgatcgagagagttacctgcaaggtattatgcaagcggcttgatgaggacactcaactacgtgtgagtaggagtgcgttgctcagcagttgacgcgtgagccgcttgagcagcttgataaaggtcctaatcgtcttccagctgttggcagacgacaatgtgctgtagtagtaggataggcccgtaaaagtgtagaagcaataggttgagactgactgtaatgggtacttgcgttcaaagactgaaagtccaaaggattgctcaaaggcccctgaggtctgagcctctgagcgcgctcttcgtcaaaattcgccggggccatcggtcatcctctcgagggcagcatcttcctgcttgaagactgagtccgtctcaggcttgctggtcacattattgtcagtacctaccatgaagaattcaatattattttacattgtcaaccattacatggatcccatgttgtgcatagcctctatgtcatcctttggtcttttatgtctgtagcgtgctagtagtattcaagttgtagcactgctgtgaaacagtacgttcaagtagtgtgcagcagtacgttcagttagtggactggggcagcctcgccttcagcaaaggttaggtacatgagccagttgctcactcttgctttctacgaatcccataggctactttgccccctaaccgtgacgaccccctgtgtttgagaagtttgagtctttttacgttaccgtgaccaagcgagcagagtagaaactcttgaagttgtgtatgtaagaatacaaattgagaacacaaggttacctacctttatagttggtaaacagcaagcaataccagagattttcatcgcaacgtgactctatcattcactatattaagttgcacacggatgttgtacaacactacacgtaaaagagagaaaaatactaatgtcgatcgctcaggt

SEQ ID NO: 264 - DNA, 567 bp, synthetic construct
  source 1..567: mol_type = other DNA
atgaagaagcccattatcgccgtggatatggacgacacaatttgccatctcgtccgacgtgccatttatcataacaatatcaattttccaacacacccccttcgatatgaggatatgacgcattgggatacgtcccatctgcgccaccctgaatccacgcatgatgttttttacggacgacccggcttgtttgaggagctggaattgtacgacgagtacgtcgtggacgagatgcagaaacttaatgaagcctacgacgttatcattgtcaccgccgccgaccctaaaactgttgtcgagaagtggaactggctccagcgccacatgccgtttattaccgccgagcagtttattacgtgcaaacgaaagaatctcatcaacttcgatttgctgatcgatgatggtgcccataatctcatcccagcatggaaagctggtaaaaaagttatctgcatcccgcacccgtggaacggttccgaacgcgaacagtaccctttcccgctcatgtcgagctggaagggcgctaaggcatacatcgatgacctgttcgaaactgcctccggataa

SEQ ID NO: 265 - DNA, 3637 bp, synthetic construct
  source 1..3637: mol_type = other DNA
agatgtagccggcgctgtagagttttggacggataggttgggtttcagtcgagacttcgttgaagatgactttgcaggcgtcgtgcgtgatgatgtgaccctgtttatctcggccgttcaagatcaagttgtccctgacaatacacttgcatgggtctgggtacgcggattagatgaattgtacgcggaatggtctgaagttgtatccactaactttcgtgacgcttcaggtcctgctatgactgagattggtgaacaaccctgggggcgtgagttcgcactccgagatccagctggaaattgtgttcatttcgtagctgaggaacaggattaatggtgttcaccactgttgcttcccctttgttggagcgtccgtcgttctgatggcgctctgagcccaaaatatcccttcttcgcccgagagcaagcctcggagtgtgcttgcaatctacttttcctactaaagttatcttcttgtggcttctgaatttgaatagaacgtgttcagacttgttagctaaatttgttgatgcgagatacttgacagaatcccgttgatgaactcatctgtgtgaccaccgcctggtgatggaatctcgcgcggaagccgtggtgttactgactctcaagcaattcagtagataaatttgtataacatcattgcaaggggtgctagcaatcaattgtccaataccaaacggcggcaagtgcaaaggggcgatagagagtttctgcgaggaagggaaggaatccgtatgcctgaaaacttttgtacaagtgtctttgtaagggcgaggtctgctctgacatctctctgagatctgagatctgatacctgcaggataacttcgtataatgtatgctatacgaagttatgtcacagtatcggcatctctgtctcgacgacagtgagtatagtcaactatgctatctagtagccaaagtaagtctacattccgggctttgcaggggttagctatttcattagacaatacttacaaccttcgaagggcttccccagaattcaattctatattgattcaatatccacccatcggacccgctctccgtaccccctgttcgcttcgccactacaaccatgtcaagacctgagaatcgtagcaaattgccccactacggcccgagtgctgtcggctggttaaagtagaatgacttgggtagccagatcgagacgcctgacattgatacgcagacagcgcagtcagtttcaaactgacaactgacgcgtactggattgacaggactccttggccggtgccattcgaatcgcttgtagacctcttgccagcatcttgccagagaagcttgaaggctggatcgctcagcctgagctcacacttagtagctccactagtcactcaggtgctcagcctctcctcagcgcctcaagctcaagcctcagggcctcagctgcatcgagctctggtgccagtgccagtgccagtgccagtgccagtgccagtgccagtgccagtgaagagagtggtatgagccaagctatacccaaaagcaaatgatggttattgccagcttccatgcacccctggggcgaaggacaacgaacaacagacagagtttgaattattcactggcctagtactaccaatttaaatttggtggttcagcgcaggaacggcgcgagtgagcgtaagggcaaactccgcatggggcgtgacgtcagtgtccctctggctgaggcactccagcaggctctggtcaacgcatcaacgtgtgtgtgtgtctaccaagcacattgtgcgctcgctgtccgtgcgccgaaatcgcaccagtcagaacgtctataaaacccctcttgcttggagggttaccgggccgtcttttcccaacgctccggctcactcactactctacacaacaaatggcaatgattttcaacgcaaaaggattcctttttgacatggacggcactctggttgacagcactgccgtcgtggagtccgtttggcgagacttttgtgcagagtacggactggatactcaggcagttatcgcatacgcacatggacgccagacaattgacacactcacgcacttcatcggtgcgggcgagaagactaacaaaattgccgcttcccttgaagaggttgaaatcaacaccacggaaggagtcacggaagttaagggagctgcggcgttgcttagcaagcttccacccgattcttgggcgttggttacttctgcgggccgaatgctggcagagaatcgaatgaaagcagctaatctgccacttcctatcgttatggtgtgtgccgaggatgttatgacgggcaagccttccccagagggatatattaaggctgcattggcactgggactggaaccaggtgagtgcgtggtgttcgaagacgcctctgctggtattaaggctggattggcttctggcgcgagcgttattgccgtccagcccgatgcactgggatcgtccgaagcccatgcagtctccgagctttccgacattatggtgaaaatttctggtgaacgctttaacatcatctgcggttaacacggatcaacaaaaatgtgcgccagctttgttgtgtgcccttttcctctagcggatcctatccacatttcgtgaatgaaccgattaagctctgacgagatttccttgttttctgtagatacctcttgtagaggtgtcaaagttatgttgtgatcgagagagttacctgcaaggtattatgcaagcggcttgatgaggacactcaactacgtgtgagtaggagtgcgttgctcagcagttgacgcgtgagccgcttgagcagcttgataaaggtcctaatcgtcttccagctgttggcagacgacaatgtgctgtagtagtaggataggcccgtaaaagtgtagaagcaataggttgagactgactgtaatgggtacttgcgttcaaagactgaaagtccaaaggattgctcaaaggcccctgaggtctgagcctctgagcgcgctcttcgtcaaaattcgccggggccatcggtcatcctctcgagggcagcatcttcctgcttgaagactgagtccgtctcaggcttgctggtcacattattgtcagtacctaccatgaagaattcaatattattttacattgtcaaccattacatggatcccatgttgtgcatagcctctatgtcatcctttggtcttttatgtctgtagcgtgctagtagtattcaagttgtagcactgctgtgaaacagtacgttcaagtagtgtgcagcagtacgttcagttagtggactggggcagcctcgccttcagcaaaggttaggtacatgagccagttgctcactcttgctttctacgaatcccataggctactttgccccctaaccgtgacgaccccctgtgtttgagaagtttgagtctttttacgttaccgtgaccaagcgagcagagtagaaactcttgaagttgtgtatgtaagaatacaaattgagaacacaaggttacctacctttatagttggtaaacagcaagcaataccagagattttcatcgcaacgtgactctatcattcactatattaagttgcacacggatgttgtacaacactacacgtaaaagagagaaaaatactaatgtcgatcgctcaggt

SEQ ID NO: 266 - DNA, 645 bp, synthetic construct
  source 1..645: mol_type = other DNA
atggcaatgattttcaacgcaaaaggattcctttttgacatggacggcactctggttgacagcactgccgtcgtggagtccgtttggcgagacttttgtgcagagtacggactggatactcaggcagttatcgcatacgcacatggacgccagacaattgacacactcacgcacttcatcggtgcgggcgagaagactaacaaaattgccgcttcccttgaagaggttgaaatcaacaccacggaaggagtcacggaagttaagggagctgcggcgttgcttagcaagcttccacccgattcttgggcgttggttacttctgcgggccgaatgctggcagagaatcgaatgaaagcagctaatctgccacttcctatcgttatggtgtgtgccgaggatgttatgacgggcaagccttccccagagggatatattaaggctgcattggcactgggactggaaccaggtgagtgcgtggtgttcgaagacgcctctgctggtattaaggctggattggcttctggcgcgagcgttattgccgtccagcccgatgcactgggatcgtccgaagcccatgcagtctccgagctttccgacattatggtgaaaatttctggtgaacgctttaacatcatctgcggttaa

SEQ ID NO: 267 - DNA, 3652 bp, synthetic construct
  source 1..3652: mol_type = other DNA
agatgtagccggcgctgtagagttttggacggataggttgggtttcagtcgagacttcgttgaagatgactttgcaggcgtcgtgcgtgatgatgtgaccctgtttatctcggccgttcaagatcaagttgtccctgacaatacacttgcatgggtctgggtacgcggattagatgaattgtacgcggaatggtctgaagttgtatccactaactttcgtgacgcttcaggtcctgctatgactgagattggtgaacaaccctgggggcgtgagttcgcactccgagatccagctggaaattgtgttcatttcgtagctgaggaacaggattaatggtgttcaccactgttgcttcccctttgttggagcgtccgtcgttctgatggcgctctgagcccaaaatatcccttcttcgcccgagagcaagcctcggagtgtgcttgcaatctacttttcctactaaagttatcttcttgtggcttctgaatttgaatagaacgtgttcagacttgttagctaaatttgttgatgcgagatacttgacagaatcccgttgatgaactcatctgtgtgaccaccgcctggtgatggaatctcgcgcggaagccgtggtgttactgactctcaagcaattcagtagataaatttgtataacatcattgcaaggggtgctagcaatcaattgtccaataccaaacggcggcaagtgcaaaggggcgatagagagtttctgcgaggaagggaaggaatccgtatgcctgaaaacttttgtacaagtgtctttgtaagggcgaggtctgctctgacatctctctgagatctgagatctgatacctgcaggataacttcgtataatgtatgctatacgaagttatgtcacagtatcggcatctctgtctcgacgacagtgagtatagtcaactatgctatctagtagccaaagtaagtctacattccgggctttgcaggggttagctatttcattagacaatacttacaaccttcgaagggcttccccagaattcaattctatattgattcaatatccacccatcggacccgctctccgtaccccctgttcgcttcgccactacaaccatgtcaagacctgagaatcgtagcaaattgccccactacggcccgagtgctgtcggctggttaaagtagaatgacttgggtagccagatcgagacgcctgacattgatacgcagacagcgcagtcagtttcaaactgacaactgacgcgtactggattgacaggactccttggccggtgccattcgaatcgcttgtagacctcttgccagcatcttgccagagaagcttgaaggctggatcgctcagcctgagctcacacttagtagctccactagtcactcaggtgctcagcctctcctcagcgcctcaagctcaagcctcagggcctcagctgcatcgagctctggtgccagtgccagtgccagtgccagtgccagtgccagtgccagtgccagtgaagagagtggtatgagccaagctatacccaaaagcaaatgatggttattgccagcttccatgcacccctggggcgaaggacaacgaacaacagacagagtttgaattattcactggcctagtactaccaatttaaatttggtggttcagcgcaggaacggcgcgagtgagcgtaagggcaaactccgcatggggcgtgacgtcagtgtccctctggctgaggcactccagcaggctctggtcaacgcatcaacgtgtgtgtgtgtctaccaagcacattgtgcgctcgctgtccgtgcgccgaaatcgcaccagtcagaacgtctataaaacccctcttgcttggagggttaccgggccgtcttttcccaacgctccggctcactcactactctacacaacaaatgacctcccacaaaacattcccgatcgcaggtattcttttcgactcggacggtgttttggtggactcgcacgaagcagcggctacagcatggaatcattgggcccgcacgtgggctccaggtttcgactttcatcgtgacgctcaacatggtcgtcgcctctctgatgttgtcgctgagttggttggcgatggcgattctgcactggcgacaaaagtgttgacagaattggagattgaaatggctacagaagtccccgctatggccggtgctgtggacctcctctcctcttccccagcggaccgttgggcggtcgtcacctccggtgcccgtgaaatggcggcagctcgtctcttgtctgctggcctgccaacgccccgcgtccttgtttccgctgacgatgtcactgctggtaaacccgcgccagagccatatcttaccggtgcacatctcttgggattggaaccccgcgtctgtgcggtcttcgaagatgcacacctgggcattttggcggcacgcgcggcgaacgtcggtttcgttgtcggtgtgggagcgcaaacaatcggtgaagatgtcgacgtttctgttgcggacctgtccggtattacttttgatggttcccacttggtcatcgaagccgatgcggtgctgacccgataacacggatcaacaaaaatgtgcgccagctttgttgtgtgcccttttcctctagcggatcctatccacatttcgtgaatgaaccgattaagctctgacgagatttccttgttttctgtagatacctcttgtagaggtgtcaaagttatgttgtgatcgagagagttacctgcaaggtattatgcaagcggcttgatgaggacactcaactacgtgtgagtaggagtgcgttgctcagcagttgacgcgtgagccgcttgagcagcttgataaaggtcctaatcgtcttccagctgttggcagacgacaatgtgctgtagtagtaggataggcccgtaaaagtgtagaagcaataggttgagactgactgtaatgggtacttgcgttcaaagactgaaagtccaaaggattgctcaaaggcccctgaggtctgagcctctgagcgcgctcttcgtcaaaattcgccggggccatcggtcatcctctcgagggcagcatcttcctgcttgaagactgagtccgtctcaggcttgctggtcacattattgtcagtacctaccatgaagaattcaatattattttacattgtcaaccattacatggatcccatgttgtgcatagcctctatgtcatcctttggtcttttatgtctgtagcgtgctagtagtattcaagttgtagcactgctgtgaaacagtacgttcaagtagtgtgcagcagtacgttcagttagtggactggggcagcctcgccttcagcaaaggttaggtacatgagccagttgctcactcttgctttctacgaatcccataggctactttgccccctaaccgtgacgaccccctgtgtttgagaagtttgagtctttttacgttaccgtgaccaagcgagcagagtagaaactcttgaagttgtgtatgtaagaatacaaattgagaacacaaggttacctacctttatagttggtaaacagcaagcaataccagagattttcatcgcaacgtgactctatcattcactatattaagttgcacacggatgttgtacaacactacacgtaaaagagagaaaaatactaatgtcgatcgctcaggt

SEQ ID NO: 268 - DNA, 660 bp, synthetic construct
  source 1..660: mol_type = other DNA
atgacctcccacaaaacattcccgatcgcaggtattcttttcgactcggacggtgttttggtggactcgcacgaagcagcggctacagcatggaatcattgggcccgcacgtgggctccaggtttcgactttcatcgtgacgctcaacatggtcgtcgcctctctgatgttgtcgctgagttggttggcgatggcgattctgcactggcgacaaaagtgttgacagaattggagattgaaatggctacagaagtccccgctatggccggtgctgtggacctcctctcctcttccccagcggaccgttgggcggtcgtcacctccggtgcccgtgaaatggcggcagctcgtctcttgtctgctggcctgccaacgccccgcgtccttgtttccgctgacgatgtcactgctggtaaacccgcgccagagccatatcttaccggtgcacatctcttgggattggaaccccgcgtctgtgcggtcttcgaagatgcacacctgggcattttggcggcacgcgcggcgaacgtcggtttcgttgtcggtgtgggagcgcaaacaatcggtgaagatgtcgacgtttctgttgcggacctgtccggtattacttttgatggttcccacttggtcatcgaagccgatgcggtgctgacccgataa

SEQ ID NO: 269 - DNA, 3679 bp, synthetic construct
  source 1..3679: mol_type = other DNA
agatgtagccggcgctgtagagttttggacggataggttgggtttcagtcgagacttcgttgaagatgactttgcaggcgtcgtgcgtgatgatgtgaccctgtttatctcggccgttcaagatcaagttgtccctgacaatacacttgcatgggtctgggtacgcggattagatgaattgtacgcggaatggtctgaagttgtatccactaactttcgtgacgcttcaggtcctgctatgactgagattggtgaacaaccctgggggcgtgagttcgcactccgagatccagctggaaattgtgttcatttcgtagctgaggaacaggattaatggtgttcaccactgttgcttcccctttgttggagcgtccgtcgttctgatggcgctctgagcccaaaatatcccttcttcgcccgagagcaagcctcggagtgtgcttgcaatctacttttcctactaaagttatcttcttgtggcttctgaatttgaatagaacgtgttcagacttgttagctaaatttgttgatgcgagatacttgacagaatcccgttgatgaactcatctgtgtgaccaccgcctggtgatggaatctcgcgcggaagccgtggtgttactgactctcaagcaattcagtagataaatttgtataacatcattgcaaggggtgctagcaatcaattgtccaataccaaacggcggcaagtgcaaaggggcgatagagagtttctgcgaggaagggaaggaatccgtatgcctgaaaacttttgtacaagtgtctttgtaagggcgaggtctgctctgacatctctctgagatctgagatctgatacctgcaggataacttcgtataatgtatgctatacgaagttatgtcacagtatcggcatctctgtctcgacgacagtgagtatagtcaactatgctatctagtagccaaagtaagtctacattccgggctttgcaggggttagctatttcattagacaatacttacaaccttcgaagggcttccccagaattcaattctatattgattcaatatccacccatcggacccgctctccgtaccccctgttcgcttcgccactacaaccatgtcaagacctgagaatcgtagcaaattgccccactacggcccgagtgctgtcggctggttaaagtagaatgacttgggtagccagatcgagacgcctgacattgatacgcagacagcgcagtcagtttcaaactgacaactgacgcgtactggattgacaggactccttggccggtgccattcgaatcgcttgtagacctcttgccagcatcttgccagagaagcttgaaggctggatcgctcagcctgagctcacacttagtagctccactagtcactcaggtgctcagcctctcctcagcgcctcaagctcaagcctcagggcctcagctgcatcgagctctggtgccagtgccagtgccagtgccagtgccagtgccagtgccagtgccagtgaagagagtggtatgagccaagctatacccaaaagcaaatgatggttattgccagcttccatgcacccctggggcgaaggacaacgaacaacagacagagtttgaattattcactggcctagtactaccaatttaaatttggtggttcagcgcaggaacggcgcgagtgagcgtaagggcaaactccgcatggggcgtgacgtcagtgtccctctggctgaggcactccagcaggctctggtcaacgcatcaacgtgtgtgtgtgtctaccaagcacattgtgcgctcgctgtccgtgcgccgaaatcgcaccagtcagaacgtctataaaacccctcttgcttggagggttaccgggccgtcttttcccaacgctccggctcactcactactctacacaacaaatggaaaacaaaattcgcgctgagcttcgagtgcgagcacttctcctggatcttgatggcacgcttgtcgattctcatgccgtcacccgacgttcgtggcaacgctgggcggaagcagtcggagtccctttggaaagcttcttccaccgaacacacggacgacctggacatgaagttatggccgaggtcttgccgcgccgttccgcagcggaaaatttggcagactcgcaggctcttctgggctatgaactcaacgacacggacggtgtccgtgctctcccaggcgctgctcgtctgcttgcatctcttgacgacatgccttgggctatcgttaccgcgagcacaaagcctttggcacgtgcgaagttggctgctgctcgactccctgttccagatgtcttggttacggctgaacaagtggatgcgggcaagcctgaccctgcaggctatctcctggcagcgcgacgtctcggcgttgacccaatgtggtgcgctgttgttgaagatgcttctgcaggagtccgtgccgccatcgccgccggaatgcccgtgttgggcgtcggcggccccgtggacccaatgccgacatgggatttggcaggtctggatgatctcgaggcactgcctgatggtgtgctcattcgccttgtcggcagcctcgcaccggcgaacggcgcaccagtttaacacggatcaacaaaaatgtgcgccagctttgttgtgtgcccttttcctctagcggatcctatccacatttcgtgaatgaaccgattaagctctgacgagatttccttgttttctgtagatacctcttgtagaggtgtcaaagttatgttgtgatcgagagagttacctgcaaggtattatgcaagcggcttgatgaggacactcaactacgtgtgagtaggagtgcgttgctcagcagttgacgcgtgagccgcttgagcagcttgataaaggtcctaatcgtcttccagctgttggcagacgacaatgtgctgtagtagtaggataggcccgtaaaagtgtagaagcaataggttgagactgactgtaatgggtacttgcgttcaaagactgaaagtccaaaggattgctcaaaggcccctgaggtctgagcctctgagcgcgctcttcgtcaaaattcgccggggccatcggtcatcctctcgagggcagcatcttcctgcttgaagactgagtccgtctcaggcttgctggtcacattattgtcagtacctaccatgaagaattcaatattattttacattgtcaaccattacatggatcccatgttgtgcatagcctctatgtcatcctttggtcttttatgtctgtagcgtgctagtagtattcaagttgtagcactgctgtgaaacagtacgttcaagtagtgtgcagcagtacgttcagttagtggactggggcagcctcgccttcagcaaaggttaggtacatgagccagttgctcactcttgctttctacgaatcccataggctactttgccccctaaccgtgacgaccccctgtgtttgagaagtttgagtctttttacgttaccgtgaccaagcgagcagagtagaaactcttgaagttgtgtatgtaagaatacaaattgagaacacaaggttacctacctttatagttggtaaacagcaagcaataccagagattttcatcgcaacgtgactctatcattcactatattaagttgcacacggatgttgtacaacactacacgtaaaagagagaaaaatactaatgtcgatcgctcaggt

SEQ ID NO: 270 - DNA, 687 bp, synthetic construct
  source 1..687: mol_type = other DNA
atggaaaacaaaattcgcgctgagcttcgagtgcgagcacttctcctggatcttgatggcacgcttgtcgattctcatgccgtcacccgacgttcgtggcaacgctgggcggaagcagtcggagtccctttggaaagcttcttccaccgaacacacggacgacctggacatgaagttatggccgaggtcttgccgcgccgttccgcagcggaaaatttggcagactcgcaggctcttctgggctatgaactcaacgacacggacggtgtccgtgctctcccaggcgctgctcgtctgcttgcatctcttgacgacatgccttgggctatcgttaccgcgagcacaaagcctttggcacgtgcgaagttggctgctgctcgactccctgttccagatgtcttggttacggctgaacaagtggatgcgggcaagcctgaccctgcaggctatctcctggcagcgcgacgtctcggcgttgacccaatgtggtgcgctgttgttgaagatgcttctgcaggagtccgtgccgccatcgccgccggaatgcccgtgttgggcgtcggcggccccgtggacccaatgccgacatgggatttggcaggtctggatgatctcgaggcactgcctgatggtgtgctcattcgccttgtcggcagcctcgcaccggcgaacggcgcaccagtttaa

SEQ ID NO: 271 - DNA, 3643 bp, synthetic construct
  source 1..3643: mol_type = other DNA
agatgtagccggcgctgtagagttttggacggataggttgggtttcagtcgagacttcgttgaagatgactttgcaggcgtcgtgcgtgatgatgtgaccctgtttatctcggccgttcaagatcaagttgtccctgacaatacacttgcatgggtctgggtacgcggattagatgaattgtacgcggaatggtctgaagttgtatccactaactttcgtgacgcttcaggtcctgctatgactgagattggtgaacaaccctgggggcgtgagttcgcactccgagatccagctggaaattgtgttcatttcgtagctgaggaacaggattaatggtgttcaccactgttgcttcccctttgttggagcgtccgtcgttctgatggcgctctgagcccaaaatatcccttcttcgcccgagagcaagcctcggagtgtgcttgcaatctacttttcctactaaagttatcttcttgtggcttctgaatttgaatagaacgtgttcagacttgttagctaaatttgttgatgcgagatacttgacagaatcccgttgatgaactcatctgtgtgaccaccgcctggtgatggaatctcgcgcggaagccgtggtgttactgactctcaagcaattcagtagataaatttgtataacatcattgcaaggggtgctagcaatcaattgtccaataccaaacggcggcaagtgcaaaggggcgatagagagtttctgcgaggaagggaaggaatccgtatgcctgaaaacttttgtacaagtgtctttgtaagggcgaggtctgctctgacatctctctgagatctgagatctgatacctgcaggataacttcgtataatgtatgctatacgaagttatgtcacagtatcggcatctctgtctcgacgacagtgagtatagtcaactatgctatctagtagccaaagtaagtctacattccgggctttgcaggggttagctatttcattagacaatacttacaaccttcgaagggcttccccagaattcaattctatattgattcaatatccacccatcggacccgctctccgtaccccctgttcgcttcgccactacaaccatgtcaagacctgagaatcgtagcaaattgccccactacggcccgagtgctgtcggctggttaaagtagaatgacttgggtagccagatcgagacgcctgacattgatacgcagacagcgcagtcagtttcaaactgacaactgacgcgtactggattgacaggactccttggccggtgccattcgaatcgcttgtagacctcttgccagcatcttgccagagaagcttgaaggctggatcgctcagcctgagctcacacttagtagctccactagtcactcaggtgctcagcctctcctcagcgcctcaagctcaagcctcagggcctcagctgcatcgagctctggtgccagtgccagtgccagtgccagtgccagtgccagtgccagtgccagtgaagagagtggtatgagccaagctatacccaaaagcaaatgatggttattgccagcttccatgcacccctggggcgaaggacaacgaacaacagacagagtttgaattattcactggcctagtactaccaatttaaatttggtggttcagcgcaggaacggcgcgagtgagcgtaagggcaaactccgcatggggcgtgacgtcagtgtccctctggctgaggcactccagcaggctctggtcaacgcatcaacgtgtgtgtgtgtctaccaagcacattgtgcgctcgctgtccgtgcgccgaaatcgcaccagtcagaacgtctataaaacccctcttgcttggagggttaccgggccgtcttttcccaacgctccggctcactcactactctacacaacaaatgacccgtgaacgtgttcagtcggactttggcaaatatgttctgttcgatgttgacggaacgctcattgatgcaacggataaccaacgccgcgtttggaagacgtgggctggtcgctacggcctggacccagatgcggtccatgagctcgcgttgcgtacccgtcccatggaaactttcgccgaagtggctcctgaccgtgaccctcaagaatgtcttgccgttctccatgaattggaagacgaagacgtgcgcagcggcgtgtatggtgcgtttgatggcgcctcggaactcctttccgcattgccgcctggctgttggggtctggtgacctctaattacgaacaccgagttcgcggccgatttgctcgaactggcctgccggttccgggcgttgtcgtcgacgctgctgcagtggacgagggaaagccttcgcccgttccgtacttgctggcggcgggtcgattgggtgcagagccagaagattgtcttgtcgtggaagatgccccttcgggcgtggaatctggccgtcgagcgggaatgactgtgtggggcgtgaatacacctggcggagttgacggtgtgcatcgccatttcacatcgttgcgtgaagcggtccccgacattttggcttttgttgcaggcggataacacggatcaacaaaaatgtgcgccagctttgttgtgtgcccttttcctctagcggatcctatccacatttcgtgaatgaaccgattaagctctgacgagatttccttgttttctgtagatacctcttgtagaggtgtcaaagttatgttgtgatcgagagagttacctgcaaggtattatgcaagcggcttgatgaggacactcaactacgtgtgagtaggagtgcgttgctcagcagttgacgcgtgagccgcttgagcagcttgataaaggtcctaatcgtcttccagctgttggcagacgacaatgtgctgtagtagtaggataggcccgtaaaagtgtagaagcaataggttgagactgactgtaatgggtacttgcgttcaaagactgaaagtccaaaggattgctcaaaggcccctgaggtctgagcctctgagcgcgctcttcgtcaaaattcgccggggccatcggtcatcctctcgagggcagcatcttcctgcttgaagactgagtccgtctcaggcttgctggtcacattattgtcagtacctaccatgaagaattcaatattattttacattgtcaaccattacatggatcccatgttgtgcatagcctctatgtcatcctttggtcttttatgtctgtagcgtgctagtagtattcaagttgtagcactgctgtgaaacagtacgttcaagtagtgtgcagcagtacgttcagttagtggactggggcagcctcgccttcagcaaaggttaggtacatgagccagttgctcactcttgctttctacgaatcccataggctactttgccccctaaccgtgacgaccccctgtgtttgagaagtttgagtctttttacgttaccgtgaccaagcgagcagagtagaaactcttgaagttgtgtatgtaagaatacaaattgagaacacaaggttacctacctttatagttggtaaacagcaagcaataccagagattttcatcgcaacgtgactctatcattcactatattaagttgcacacggatgttgtacaacactacacgtaaaagagagaaaaatactaatgtcgatcgctcaggt

SEQ ID NO: 272 - DNA, 651 bp, synthetic construct
  source 1..651: mol_type = other DNA
atgacccgtgaacgtgttcagtcggactttggcaaatatgttctgttcgatgttgacggaacgctcattgatgcaacggataaccaacgccgcgtttggaagacgtgggctggtcgctacggcctggacccagatgcggtccatgagctcgcgttgcgtacccgtcccatggaaactttcgccgaagtggctcctgaccgtgaccctcaagaatgtcttgccgttctccatgaattggaagacgaagacgtgcgcagcggcgtgtatggtgcgtttgatggcgcctcggaactcctttccgcattgccgcctggctgttggggtctggtgacctctaattacgaacaccgagttcgcggccgatttgctcgaactggcctgccggttccgggcgttgtcgtcgacgctgctgcagtggacgagggaaagccttcgcccgttccgtacttgctggcggcgggtcgattgggtgcagagccagaagattgtcttgtcgtggaagatgccccttcgggcgtggaatctggccgtcgagcgggaatgactgtgtggggcgtgaatacacctggcggagttgacggtgtgcatcgccatttcacatcgttgcgtgaagcggtccccgacattttggcttttgttgcaggcggataa

SEQ ID NO: 273 - DNA, 3754 bp, synthetic construct
  source 1..3754: mol_type = other DNA
agatgtagccggcgctgtagagttttggacggataggttgggtttcagtcgagacttcgttgaagatgactttgcaggcgtcgtgcgtgatgatgtgaccctgtttatctcggccgttcaagatcaagttgtccctgacaatacacttgcatgggtctgggtacgcggattagatgaattgtacgcggaatggtctgaagttgtatccactaactttcgtgacgcttcaggtcctgctatgactgagattggtgaacaaccctgggggcgtgagttcgcactccgagatccagctggaaattgtgttcatttcgtagctgaggaacaggattaatggtgttcaccactgttgcttcccctttgttggagcgtccgtcgttctgatggcgctctgagcccaaaatatcccttcttcgcccgagagcaagcctcggagtgtgcttgcaatctacttttcctactaaagttatcttcttgtggcttctgaatttgaatagaacgtgttcagacttgttagctaaatttgttgatgcgagatacttgacagaatcccgttgatgaactcatctgtgtgaccaccgcctggtgatggaatctcgcgcggaagccgtggtgttactgactctcaagcaattcagtagataaatttgtataacatcattgcaaggggtgctagcaatcaattgtccaataccaaacggcggcaagtgcaaaggggcgatagagagtttctgcgaggaagggaaggaatccgtatgcctgaaaacttttgtacaagtgtctttgtaagggcgaggtctgctctgacatctctctgagatctgagatctgatacctgcaggataacttcgtataatgtatgctatacgaagttatgtcacagtatcggcatctctgtctcgacgacagtgagtatagtcaactatgctatctagtagccaaagtaagtctacattccgggctttgcaggggttagctatttcattagacaatacttacaaccttcgaagggcttccccagaattcaattctatattgattcaatatccacccatcggacccgctctccgtaccccctgttcgcttcgccactacaaccatgtcaagacctgagaatcgtagcaaattgccccactacggcccgagtgctgtcggctggttaaagtagaatgacttgggtagccagatcgagacgcctgacattgatacgcagacagcgcagtcagtttcaaactgacaactgacgcgtactggattgacaggactccttggccggtgccattcgaatcgcttgtagacctcttgccagcatcttgccagagaagcttgaaggctggatcgctcagcctgagctcacacttagtagctccactagtcactcaggtgctcagcctctcctcagcgcctcaagctcaagcctcagggcctcagctgcatcgagctctggtgccagtgccagtgccagtgccagtgccagtgccagtgccagtgccagtgaagagagtggtatgagccaagctatacccaaaagcaaatgatggttattgccagcttccatgcacccctggggcgaaggacaacgaacaacagacagagtttgaattattcactggcctagtactaccaatttaaatttggtggttcagcgcaggaacggcgcgagtgagcgtaagggcaaactccgcatggggcgtgacgtcagtgtccctctggctgaggcactccagcaggctctggtcaacgcatcaacgtgtgtgtgtgtctaccaagcacattgtgcgctcgctgtccgtgcgccgaaatcgcaccagtcagaacgtctataaaacccctcttgcttggagggttaccgggccgtcttttcccaacgctccggctcactcactactctacacaacaaatggtcactgagatcgaagtggacgcggtcctgttcgatatggacggtacgcttatcgactctactccggctgtgaaccaaacctgggccgagtacatcgagcgctataatttggactttgattatgtgatgtcgcactgtcatggatgtcgtacagtggaatccctgaaaaacattgttggcctgccggatgatcagttggagcagggcgttgtggagttcgagggccgtattagcgagctggcagaggaggcagcgcgaacaaatggtcccggccaaatcgtggctctcccaggagcgaaagagctgcttgcacaactgaataagggttcggaacagccaggtcgtcgcccgggatgggctatcgttacttctgcgacaaaagcgtatgcgtacgttggttttcgcgcctctggcgttaatggaacggaatttcctcgagcctttgtcacgggagataacgtgagcaagggaaaaccagaccctgagccgtatcttctcggagctaagacgctgcagccccctgctgatccaaagcgttgtcttgttattgaggacgctccaccaggcattcgttcgggtgtggccgcaggagctaaaacgctgggacttacaaccacgcatgcagagaacctgatgtggcaggcaggtgctaactgggtcgtcccagacctgtcttcggtttccgcccgatgggaaggtgagggtgcggacgcccgtctttttatccgtattgagaactcgggccaacgacccgaataacacggatcaacaaaaatgtgcgccagctttgttgtgtgcccttttcctctagcggatcctatccacatttcgtgaatgaaccgattaagctctgacgagatttccttgttttctgtagatacctcttgtagaggtgtcaaagttatgttgtgatcgagagagttacctgcaaggtattatgcaagcggcttgatgaggacactcaactacgtgtgagtaggagtgcgttgctcagcagttgacgcgtgagccgcttgagcagcttgataaaggtcctaatcgtcttccagctgttggcagacgacaatgtgctgtagtagtaggataggcccgtaaaagtgtagaagcaataggttgagactgactgtaatgggtacttgcgttcaaagactgaaagtccaaaggattgctcaaaggcccctgaggtctgagcctctgagcgcgctcttcgtcaaaattcgccggggccatcggtcatcctctcgagggcagcatcttcctgcttgaagactgagtccgtctcaggcttgctggtcacattattgtcagtacctaccatgaagaattcaatattattttacattgtcaaccattacatggatcccatgttgtgcatagcctctatgtcatcctttggtcttttatgtctgtagcgtgctagtagtattcaagttgtagcactgctgtgaaacagtacgttcaagtagtgtgcagcagtacgttcagttagtggactggggcagcctcgccttcagcaaaggttaggtacatgagccagttgctcactcttgctttctacgaatcccataggctactttgccccctaaccgtgacgaccccctgtgtttgagaagtttgagtctttttacgttaccgtgaccaagcgagcagagtagaaactcttgaagttgtgtatgtaagaatacaaattgagaacacaaggttacctacctttatagttggtaaacagcaagcaataccagagattttcatcgcaacgtgactctatcattcactatattaagttgcacacggatgttgtacaacactacacgtaaaagagagaaaaatactaatgtcgatcgctcaggt

SEQ ID NO: 274 - DNA, 762 bp, synthetic construct
  source 1..762: mol_type = other DNA
atggtcactgagatcgaagtggacgcggtcctgttcgatatggacggtacgcttatcgactctactccggctgtgaaccaaacctgggccgagtacatcgagcgctataatttggactttgattatgtgatgtcgcactgtcatggatgtcgtacagtggaatccctgaaaaacattgttggcctgccggatgatcagttggagcagggcgttgtggagttcgagggccgtattagcgagctggcagaggaggcagcgcgaacaaatggtcccggccaaatcgtggctctcccaggagcgaaagagctgcttgcacaactgaataagggttcggaacagccaggtcgtcgcccgggatgggctatcgttacttctgcgacaaaagcgtatgcgtacgttggttttcgcgcctctggcgttaatggaacggaatttcctcgagcctttgtcacgggagataacgtgagcaagggaaaaccagaccctgagccgtatcttctcggagctaagacgctgcagccccctgctgatccaaagcgttgtcttgttattgaggacgctccaccaggcattcgttcgggtgtggccgcaggagctaaaacgctgggacttacaaccacgcatgcagagaacctgatgtggcaggcaggtgctaactgggtcgtcccagacctgtcttcggtttccgcccgatgggaaggtgagggtgcggacgcccgtctttttatccgtattgagaactcgggccaacgacccgaataa

SEQ ID NO: 275 - DNA, 3790 bp, synthetic construct
  source 1..3790: mol_type = other DNA
agatgtagccggcgctgtagagttttggacggataggttgggtttcagtcgagacttcgttgaagatgactttgcaggcgtcgtgcgtgatgatgtgaccctgtttatctcggccgttcaagatcaagttgtccctgacaatacacttgcatgggtctgggtacgcggattagatgaattgtacgcggaatggtctgaagttgtatccactaactttcgtgacgcttcaggtcctgctatgactgagattggtgaacaaccctgggggcgtgagttcgcactccgagatccagctggaaattgtgttcatttcgtagctgaggaacaggattaatggtgttcaccactgttgcttcccctttgttggagcgtccgtcgttctgatggcgctctgagcccaaaatatcccttcttcgcccgagagcaagcctcggagtgtgcttgcaatctacttttcctactaaagttatcttcttgtggcttctgaatttgaatagaacgtgttcagacttgttagctaaatttgttgatgcgagatacttgacagaatcccgttgatgaactcatctgtgtgaccaccgcctggtgatggaatctcgcgcggaagccgtggtgttactgactctcaagcaattcagtagataaatttgtataacatcattgcaaggggtgctagcaatcaattgtccaataccaaacggcggcaagtgcaaaggggcgatagagagtttctgcgaggaagggaaggaatccgtatgcctgaaaacttttgtacaagtgtctttgtaagggcgaggtctgctctgacatctctctgagatctgagatctgatacctgcaggataacttcgtataatgtatgctatacgaagttatgtcacagtatcggcatctctgtctcgacgacagtgagtatagtcaactatgctatctagtagccaaagtaagtctacattccgggctttgcaggggttagctatttcattagacaatacttacaaccttcgaagggcttccccagaattcaattctatattgattcaatatccacccatcggacccgctctccgtaccccctgttcgcttcgccactacaaccatgtcaagacctgagaatcgtagcaaattgccccactacggcccgagtgctgtcggctggttaaagtagaatgacttgggtagccagatcgagacgcctgacattgatacgcagacagcgcagtcagtttcaaactgacaactgacgcgtactggattgacaggactccttggccggtgccattcgaatcgcttgtagacctcttgccagcatcttgccagagaagcttgaaggctggatcgctcagcctgagctcacacttagtagctccactagtcactcaggtgctcagcctctcctcagcgcctcaagctcaagcctcagggcctcagctgcatcgagctctggtgccagtgccagtgccagtgccagtgccagtgccagtgccagtgccagtgaagagagtggtatgagccaagctatacccaaaagcaaatgatggttattgccagcttccatgcacccctggggcgaaggacaacgaacaacagacagagtttgaattattcactggcctagtactaccaatttaaatttggtggttcagcgcaggaacggcgcgagtgagcgtaagggcaaactccgcatggggcgtgacgtcagtgtccctctggctgaggcactccagcaggctctggtcaacgcatcaacgtgtgtgtgtgtctaccaagcacattgtgcgctcgctgtccgtgcgccgaaatcgcaccagtcagaacgtctataaaacccctcttgcttggagggttaccgggccgtcttttcccaacgctccggctcactcactactctacacaacaaatggctaaactcgatgcttccggttttctcattgatttggacggcactatttttcgcggccaggagcttatcgatggcgccaccgaggctatccacacattgcagtcgctgggcaaatcggtggtgtttttgtcgaatcgaggtaatttgagccgcgcaatgtgtcgtaaaaaactcctgggcgctggcattcgcacagatgagcgatcgattgtgctctcttcttctgtcacagcgagcttccttaaaaagcattatccgctgtctaaggtgtgggtcctgggagagaagggtttgacggatgaacttgcactcgcgggcgttacaatggctcaaaaaccacaagcagcggattggctggtcatttcgttgcatgaaacagtgacttatgaagatttgaaccttgcgttcaaagccgcctcctccggtgcgcgaattatcgctacaaaccgcgaccgatccttccccaacgaaggcggccacgcaatggacgtggtgggcatgatcggcgctattgaagcttccgctggcgctaagactgaactcgtcgtgggcaagccaagctggctgatggctgaagccgcgtgcgaagctctgggccttccacccgtggagtgcgcgatcattggagactcgcttgagagcgacatcgctatgggtcgtttgtacggaatgaagtcggtgcttgtgatgacaggatctgctaagttgggagtgccacgcctttacgagcctgacattgtgttggattccatcaaagaccttacagaactggcgaaggagggtattctgctctaacacggatcaacaaaaatgtgcgccagctttgttgtgtgcccttttcctctagcggatcctatccacatttcgtgaatgaaccgattaagctctgacgagatttccttgttttctgtagatacctcttgtagaggtgtcaaagttatgttgtgatcgagagagttacctgcaaggtattatgcaagcggcttgatgaggacactcaactacgtgtgagtaggagtgcgttgctcagcagttgacgcgtgagccgcttgagcagcttgataaaggtcctaatcgtcttccagctgttggcagacgacaatgtgctgtagtagtaggataggcccgtaaaagtgtagaagcaataggttgagactgactgtaatgggtacttgcgttcaaagactgaaagtccaaaggattgctcaaaggcccctgaggtctgagcctctgagcgcgctcttcgtcaaaattcgccggggccatcggtcatcctctcgagggcagcatcttcctgcttgaagactgagtccgtctcaggcttgctggtcacattattgtcagtacctaccatgaagaattcaatattattttacattgtcaaccattacatggatcccatgttgtgcatagcctctatgtcatcctttggtcttttatgtctgtagcgtgctagtagtattcaagttgtagcactgctgtgaaacagtacgttcaagtagtgtgcagcagtacgttcagttagtggactggggcagcctcgccttcagcaaaggttaggtacatgagccagttgctcactcttgctttctacgaatcccataggctactttgccccctaaccgtgacgaccccctgtgtttgagaagtttgagtctttttacgttaccgtgaccaagcgagcagagtagaaactcttgaagttgtgtatgtaagaatacaaattgagaacacaaggttacctacctttatagttggtaaacagcaagcaataccagagattttcatcgcaacgtgactctatcattcactatattaagttgcacacggatgttgtacaacactacacgtaaaagagagaaaaatactaatgtcgatcgctcaggt

SEQ ID NO: 276 - DNA, 798 bp, synthetic construct
  source 1..798: mol_type = other DNA
atggctaaactcgatgcttccggttttctcattgatttggacggcactatttttcgcggccaggagcttatcgatggcgccaccgaggctatccacacattgcagtcgctgggcaaatcggtggtgtttttgtcgaatcgaggtaatttgagccgcgcaatgtgtcgtaaaaaactcctgggcgctggcattcgcacagatgagcgatcgattgtgctctcttcttctgtcacagcgagcttccttaaaaagcattatccgctgtctaaggtgtgggtcctgggagagaagggtttgacggatgaacttgcactcgcgggcgttacaatggctcaaaaaccacaagcagcggattggctggtcatttcgttgcatgaaacagtgacttatgaagatttgaaccttgcgttcaaagccgcctcctccggtgcgcgaattatcgctacaaaccgcgaccgatccttccccaacgaaggcggccacgcaatggacgtggtgggcatgatcggcgctattgaagcttccgctggcgctaagactgaactcgtcgtgggcaagccaagctggctgatggctgaagccgcgtgcgaagctctgggccttccacccgtggagtgcgcgatcattggagactcgcttgagagcgacatcgctatgggtcgtttgtacggaatgaagtcggtgcttgtgatgacaggatctgctaagttgggagtgccacgcctttacgagcctgacattgtgttggattccatcaaagaccttacagaactggcgaaggagggtattctgctctaa

SEQ ID NO: 277 - DNA, 3733 bp, synthetic construct
  source 1..3733: mol_type = other DNA
agatgtagccggcgctgtagagttttggacggataggttgggtttcagtcgagacttcgttgaagatgactttgcaggcgtcgtgcgtgatgatgtgaccctgtttatctcggccgttcaagatcaagttgtccctgacaatacacttgcatgggtctgggtacgcggattagatgaattgtacgcggaatggtctgaagttgtatccactaactttcgtgacgcttcaggtcctgctatgactgagattggtgaacaaccctgggggcgtgagttcgcactccgagatccagctggaaattgtgttcatttcgtagctgaggaacaggattaatggtgttcaccactgttgcttcccctttgttggagcgtccgtcgttctgatggcgctctgagcccaaaatatcccttcttcgcccgagagcaagcctcggagtgtgcttgcaatctacttttcctactaaagttatcttcttgtggcttctgaatttgaatagaacgtgttcagacttgttagctaaatttgttgatgcgagatacttgacagaatcccgttgatgaactcatctgtgtgaccaccgcctggtgatggaatctcgcgcggaagccgtggtgttactgactctcaagcaattcagtagataaatttgtataacatcattgcaaggggtgctagcaatcaattgtccaataccaaacggcggcaagtgcaaaggggcgatagagagtttctgcgaggaagggaaggaatccgtatgcctgaaaacttttgtacaagtgtctttgtaagggcgaggtctgctctgacatctctctgagatctgagatctgatacctgcaggataacttcgtataatgtatgctatacgaagttatgtcacagtatcggcatctctgtctcgacgacagtgagtatagtcaactatgctatctagtagccaaagtaagtctacattccgggctttgcaggggttagctatttcattagacaatacttacaaccttcgaagggcttccccagaattcaattctatattgattcaatatccacccatcggacccgctctccgtaccccctgttcgcttcgccactacaaccatgtcaagacctgagaatcgtagcaaattgccccactacggcccgagtgctgtcggctggttaaagtagaatgacttgggtagccagatcgagacgcctgacattgatacgcagacagcgcagtcagtttcaaactgacaactgacgcgtactggattgacaggactccttggccggtgccattcgaatcgcttgtagacctcttgccagcatcttgccagagaagcttgaaggctggatcgctcagcctgagctcacacttagtagctccactagtcactcaggtgctcagcctctcctcagcgcctcaagctcaagcctcagggcctcagctgcatcgagctctggtgccagtgccagtgccagtgccagtgccagtgccagtgccagtgccagtgaagagagtggtatgagccaagctatacccaaaagcaaatgatggttattgccagcttccatgcacccctggggcgaaggacaacgaacaacagacagagtttgaattattcactggcctagtactaccaatttaaatttggtggttcagcgcaggaacggcgcgagtgagcgtaagggcaaactccgcatggggcgtgacgtcagtgtccctctggctgaggcactccagcaggctctggtcaacgcatcaacgtgtgtgtgtgtctaccaagcacattgtgcgctcgctgtccgtgcgccgaaatcgcaccagtcagaacgtctataaaacccctcttgcttggagggttaccgggccgtcttttcccaacgctccggctcactcactactctacacaacaaatggccgaattttccgctgatttgtgcctcttcgaccttgacggaactatcgtctcgactaccgttgcggcagagaaggcgtggaccaagctctgctacgaatacggtgtggatccgtcggaactgttcaagcattctcacggtgcccgcacccaggaagttctccgtcgcttctttccgaaactggatgataccgataacaaaggagtgcttgcacttgagaaggatattgctcattcctatctcgacaccgtgtcccttatccctggagccgaaaacctccttctctccctggacgtcgatacagaaactcagaagaaactgccagaacgaaaatgggccattgtcacctccggcagcccctacctggccttctcctggttcgaaactattcttaaaaatgttggcaagcctaaagtctttatcacgggatttgacgtcaagaacggcaaacccgacccagaaggttactctcgtgcgcgagatttgttgcgacaggatctgcagttgaccggaaaacaggatttgaaatatgtcgtcttcgaagacgctcccgttggtatcaaagccggcaaggcgatgggcgccatcacggtcggaatcacttccagctacgacaagtctgtcttgtttgatgcgggtgctgactacgtggtttgcgatttgacacaggtttccgttgtcaaaaataatgagaacggcattgtgattcaagtcaataacccgttgacacgtgcttaacacggatcaacaaaaatgtgcgccagctttgttgtgtgcccttttcctctagcggatcctatccacatttcgtgaatgaaccgattaagctctgacgagatttccttgttttctgtagatacctcttgtagaggtgtcaaagttatgttgtgatcgagagagttacctgcaaggtattatgcaagcggcttgatgaggacactcaactacgtgtgagtaggagtgcgttgctcagcagttgacgcgtgagccgcttgagcagcttgataaaggtcctaatcgtcttccagctgttggcagacgacaatgtgctgtagtagtaggataggcccgtaaaagtgtagaagcaataggttgagactgactgtaatgggtacttgcgttcaaagactgaaagtccaaaggattgctcaaaggcccctgaggtctgagcctctgagcgcgctcttcgtcaaaattcgccggggccatcggtcatcctctcgagggcagcatcttcctgcttgaagactgagtccgtctcaggcttgctggtcacattattgtcagtacctaccatgaagaattcaatattattttacattgtcaaccattacatggatcccatgttgtgcatagcctctatgtcatcctttggtcttttatgtctgtagcgtgctagtagtattcaagttgtagcactgctgtgaaacagtacgttcaagtagtgtgcagcagtacgttcagttagtggactggggcagcctcgccttcagcaaaggttaggtacatgagccagttgctcactcttgctttctacgaatcccataggctactttgccccctaaccgtgacgaccccctgtgtttgagaagtttgagtctttttacgttaccgtgaccaagcgagcagagtagaaactcttgaagttgtgtatgtaagaatacaaattgagaacacaaggttacctacctttatagttggtaaacagcaagcaataccagagattttcatcgcaacgtgactctatcattcactatattaagttgcacacggatgttgtacaacactacacgtaaaagagagaaaaatactaatgtcgatcgctcaggt

SEQ ID NO: 278 - DNA, 741 bp, synthetic construct
  source 1..741: mol_type = other DNA
atggccgaattttccgctgatttgtgcctcttcgaccttgacggaactatcgtctcgactaccgttgcggcagagaaggcgtggaccaagctctgctacgaatacggtgtggatccgtcggaactgttcaagcattctcacggtgcccgcacccaggaagttctccgtcgcttctttccgaaactggatgataccgataacaaaggagtgcttgcacttgagaaggatattgctcattcctatctcgacaccgtgtcccttatccctggagccgaaaacctccttctctccctggacgtcgatacagaaactcagaagaaactgccagaacgaaaatgggccattgtcacctccggcagcccctacctggccttctcctggttcgaaactattcttaaaaatgttggcaagcctaaagtctttatcacgggatttgacgtcaagaacggcaaacccgacccagaaggttactctcgtgcgcgagatttgttgcgacaggatctgcagttgaccggaaaacaggatttgaaatatgtcgtcttcgaagacgctcccgttggtatcaaagccggcaaggcgatgggcgccatcacggtcggaatcacttccagctacgacaagtctgtcttgtttgatgcgggtgctgactacgtggtttgcgatttgacacaggtttccgttgtcaaaaataatgagaacggcattgtgattcaagtcaataacccgttgacacgtgcttaa

SEQ ID NO: 279 - DNA, 1729 bp, synthetic construct
  source 1..1729: mol_type = other DNA
cttaaacacggcaagggtagcgttgcaaacgacgtaaccgacgaaatggtccgtctgaattggctaactgagttcatgccactccccaccatcaagcacttcatccgtacacctgacgatgcgtggctgttgactacggccatccccggtaagaccgcttttcaggtcctcgaggaataccctgactcgggcgagaacatcgtggatgccttggctgtgtttttgcgccgccttcactctattccggtctgcaactgccctttcaacagcgaccgtgtttttaggcttgcccaggcacaatcacgcatgaacaatggtctagtcgacgctagtgatttcgatgacgagcgcaacggctggccggtggaacaagtgtggaaagagatgcataagctcctgcccttttccccagactctgtcgtgacgcatggtgatttctcgcttgacaacctcatctttgacgagggcaagctcattggctgcattgacgtcggccgggttggcatcgccgatcgctaccaagatcttgcgatcctctggaattgtctgggcgagttctcccctagcctccagaagcgtctgttccagaaatatgggatcgataacccagacatgaacaagctccagttccatttgatgctggatgaatttttctaatggtgttcaccactgttgcttcccctttgttggagcgtccgtcgttctgatggcgctctgagcccaaaatatcccttcttcgcccgagagcaagcctcggagtgtgcttgcaatctacttttcctactaaagttatcttcttgtggcttctgaatttgaatagaacgtgttcagacttgttagctaaatttgttgatgcgagatacttgacagaatcccgttgatgaactcatctgtgtgaccaccgcctggtgatggaatctcgcgcggaagccgtggtgttactgactctcaagcaattcagtagataaatttgtataacatcattgcaaggggtgctagcaatcaattgtccaataccaaacggcggcaagtgcaaaggggcgatagagagtttctgcgaggaagggaaggaatccgtatgcctgaaaacttttgtacaagtgtctttgtaagggcgaggtctgctctgacatctctctgagatctgagatctgatacctgcaggataacttcgtataatgtatgctatacgaagttataagcttgaagactgagtccgtctcagttgctgctacgacctcattgatcgatgatctccgacactttgagtagctttccatcctctctttactgtactttgtattcttgctactttgtgttctttcttaatggtcccgaaccggtgattttgctcatgatctttttttttttttttcgtcaactgcaagaagatgaaaaatctactgttcgatagcacctcataaccgttccagagtcccgacaaccacaaggatgtttcttagataggtgtcagcaagatccacaaaaaagtgtaggtattagatggtttcaagcaaggtacaatattctaattcaatactcatttgaataatcaatattcaacagcttctagcctacaagcttcaatgttctccgtcggttaactcagtatacttagtactcagttcaagtcagtgttgttaaaataaaatcacgtgatccaaaaacttgaaacttttcatttttctcctcagatgttggtgattcgtcccatagcggttaccacaac

SEQ ID NO: 280 - DNA, 4285 bp, synthetic construct
  source 1..4285: mol_type = other DNA
tggcatgtaggcctgtaggggctatgcctatatgctcatgcactcatgtcgcgatgttgcgatatcgcgatggaccaaccaagcaagcgtgcagcgtgggcgcttgggccaagggtgctaagctaagtgtaagcactgaagtgctgaagtgctgaagtgctgaacgtggaacgtcaggatgacacatcctctcccttcggcttcgtccaagaaaggttggtcagccatctgagatctgagatctgaaatgaatataatgatgaattgagtcgatgagatctgactatcttgggagattgcaccaatgcgccacggtgaccagatggtcttggtcttagctggtatagtggcacctgatctgccttgacagatctcatgttcatacgttcatgcattcaatcttatcgtctagccgtctgcgatctgcccaactagacgacgacaaatgtaattgatccttgtaaccctgttgctggtcgcagcagcgcgatacgatgccgtcacagtatcggcatctctgtctcgacgacagtgagtatagtcaactatgctatctagtagccaaagtaagtctacattccgggctttgcaggggttagctatttcattagacaatacttacaaccttcgaagggcttccccagaattcaattctatattgattcaatatccacccatcggacccgctctccgtaccccctgttcgcttcgccactacaaccatgtcaagacctgagaatcgtagcaaattgccccactacggcccgagtgctgtcggctggttaaagtagaatgacttgggtagccagatcgagacgcctgacattgatacgcagacagcgcagtcagtttcaaactgacaactgacgcgtactggattgacaggactccttggccggtgccattcgaatcgcttgtagacctcttgccagcatcttgccagagaagcttgaaggctggatcgctcagcctgagctcacacttagtagctccactagtcactcaggtgctcagcctctcctcagcgcctcaagctcaagcctcagggcctcagctgcatcgagctctggtgccagtgccagtgccagtgccagtgccagtgccagtgccagtgccagtgaagagagtggtatgagccaagctatacccaaaagcaaatgatggttattgccagcttccatgcacccctggggcgaaggacaacgaacaacagacagagtttgaattattcactggcctagtactaccaatttaaatttggtggttcagcgcaggaacggcgcgagtgagcgtaagggcaaactccgcatggggcgtgacgtcagtgtccctctggctgaggcactccagcaggctctggtcaacgcatcaacgtgtgtgtgtgtctaccaagcacattgtgcgctcgctgtccgtgcgccgaaatcgcaccagtcagaacgtctataaaacccctcttgcttggagggttaccgggccgtcttttcccaacgctccggctcactcactactctacacaacaaatggttaccgagatcgaagtggatgcggtgctgttcgacatggacggcaccctgattgactctacccctgctgtcaaccagacttgggccgagtacatcgaacgatacaacctcgactttgactacgtcatgtctcattgtcacggatgtcgaacggtagagagcctcaagaatatcgttggattgccggatgaccagttggaacaaggcgtagtcgagtttgaagggcgtattagtgaactggctgaagaggcggcacgtaccaatggtcctggtcaaattgtggctttgcccggcgcaaaagaactgcttgcccaactgaacaagggtagcgaacaacctggtcgtcgtcctggatgggccatcgttacttcggcaaccaaggcttacgcttacgtgggcttcagagcgtcgggcgtgaatggtacagaattccctcgtgcttttgtcacgggtgacaatgtcagcaagggcaaacctgatcctgaaccatacctcttgggagcaaagacgttacaacctcctgctgatcctaaacgttgtctcgtaatcgaagatgctcctccaggtattcgatcaggtgttgctgcaggtgccaaaacccttggattgaccactacccacgcggaaaacctcatgtggcaagcgggtgctaactgggtcgtaccagacttatcgagtgtttcggcacgttgggaaggtgaaggtgcggacgctcgtctttttattcgcattgaaaactcaggccagcgtccagagtaacacgaagggtttcccatctgtgtgacctgatccctttttacgtttttttgttttgttttttcttttgttcatgatcaacttgggagtgattcctcttggtgatgtcgaaaattgaactgttataccaatattctgttgcctttgtttcctgtttgtagtttactactttttacagtagtcgttgttcctgccttgcttgcgtttgtcagggtttccctttagcttagtaccaatatctagccttaattttgcttattctttctcaccgcccatgattgatttcaatcatgattaatgatttatgcatgaaaactcaaaatactcaattgtcttgtacaaggcaatcacaagctggtcagccattctcagcgcctataagagctttcagccaggccggccccaaaacgatctaccctgtggacctggctaggctaaactttggaaagtcatgcaattatgaacgtttgaagctcaagcgctcctaccctctcctggagcagtgcttgaagactgagtccgtctcagataacttcgtataatgtatgctatacgaagttatcctgcaggagctcagaccttgcatgttagccttgaccttgcctctatgaccactaattcgcacaagattgcacgttaccattgtcatcttgccatgtatccaatgtttcctgtttgccatagtacgtagtagatacatcgatcatcgatgcagatgacgcagatggcattggttcgctttgccctatgcatgcatcatgcatcatgcatcatgcgtcatgcgtcactatccatattaatcattgccctctgtactaggccatgacacctgcagacccttccccagggatgcttcttgtaatagccaatatactacacaactttaccgattacgatcgagatcgatctcactatagtttgtcgaacttcgatgcacatcgagggtgcggaaaaaagctgacggaagcggaagtgggtgaattggttaatttagttagattggcagggttgttcccaagattcaacgcaagctgagaaagaaaacagaaacacgaggcataaggccagtcagaaaatgcattacgaggggagttgaagtgactgtgggccagtgcctgggtcgtcatgtgcaaattttttcttcggttagactgccgcagcatgcagcaactctgccggccctatataactagtgcttcatcttcttgtcattcttgtctctttaccaacacaccggtactctttcaccatgggtaaggaaaagacacacgtatcgcgaccccgactcaactccaacatggacgcagacctgtacggatacaaatgggctcgagataatgtcggacagtcgggtgcgacgatctacagactctatggaaaaccggacgcccccgagctctttcttaaacacggcaagggtagcgttgcaaacgacgtaaccgacgaaatggtccgtctgaattggctaactgagttcatgccactccccaccatcaagcacttcatccgtacacctgacgatgcgtggctgttgactacggccatccccggtaagaccgcttttcaggtcctcgaggaataccctgactcgggcgagaacatcgtggatgccttggctgtgtttttgcgccgccttcactctattccggtctgcaactgccctttcaacagcgaccgtgtttttaggcttgcccaggcacaatcacgcatgaacaatggtctagtcgacgctagtgatttcgatgacgagcgcaacggctggccggtggaacaagtgtggaaagagatgcataagctcctgcccttttccccagactctgtcgtgacgcatggtgatttctcgcttgacaacctcatctttgacgagggcaagctcattggctgcattgacgtcggccgggttggcatcgccgatcgctaccaagatcttgcgatcctctggaattgtctgggcgagttctcccctagcctccagaagcgtctgttccagaaatatgggatcg

SEQ ID NO: 281 - DNA, 4327 bp, synthetic construct
  source 1..4327: mol_type = other DNA
tggcatgtaggcctgtaggggctatgcctatatgctcatgcactcatgtcgcgatgttgcgatatcgcgatggaccaaccaagcaagcgtgcagcgtgggcgcttgggccaagggtgctaagctaagtgtaagcactgaagtgctgaagtgctgaagtgctgaacgtggaacgtcaggatgacacatcctctcccttcggcttcgtccaagaaaggttggtcagccatctgagatctgagatctgaaatgaatataatgatgaattgagtcgatgagatctgactatcttgggagattgcaccaatgcgccacggtgaccagatggtcttggtcttagctggtatagtggcacctgatctgccttgacagatctcatgttcatacgttcatgcattcaatcttatcgtctagccgtctgcgatctgcccaactagacgacgacaaatgtaattgatccttgtaaccctgttgctggtcgcagcagcgcgatacgatgccgtcacagtatcggcatctctgtctcgacgacagtgagtatagtcaactatgctatctagtagccaaagtaagtctacattccgggctttgcaggggttagctatttcattagacaatacttacaaccttcgaagggcttccccagaattcaattctatattgattcaatatccacccatcggacccgctctccgtaccccctgttcgcttcgccactacaaccatgtcaagacctgagaatcgtagcaaattgccccactacggcccgagtgctgtcggctggttaaagtagaatgacttgggtagccagatcgagacgcctgacattgatacgcagacagcgcagtcagtttcaaactgacaactgacgcgtactggattgacaggactccttggccggtgccattcgaatcgcttgtagacctcttgccagcatcttgccagagaagcttgaaggctggatcgctcagcctgagctcacacttagtagctccactagtcactcaggtgctcagcctctcctcagcgcctcaagctcaagcctcagggcctcagctgcatcgagctctggtgccagtgccagtgccagtgccagtgccagtgccagtgccagtgccagtgaagagagtggtatgagccaagctatacccaaaagcaaatgatggttattgccagcttccatgcacccctggggcgaaggacaacgaacaacagacagagtttgaattattcactggcctagtactaccaatttaaatttggtggttcagcgcaggaacggcgcgagtgagcgtaagggcaaactccgcatggggcgtgacgtcagtgtccctctggctgaggcactccagcaggctctggtcaacgcatcaacgtgtgtgtgtgtctaccaagcacattgtgcgctcgctgtccgtgcgccgaaatcgcaccagtcagaacgtctataaaacccctcttgcttggagggttaccgggccgtcttttcccaacgctccggctcactcactactctacacaacaaatgggctcgacgactacgacacttccagcaatgaagacctctccaaaatacgttttctttaccgacttcgatggcacaattacaacgcgtgactctaacgactttatgacggataacttgggcttcggtcaagaactgcgtaagcagggaaaccgcgatgtccttgacggacgcaagacgtttcgcgactcgttccagtcgatgatggacagcatcaaaaccccgtattctaaatgtattgagacgcttattgagaacattaaattggatccaggcttcaaagagttctacgagtgggcacgcgaaaacaacatcccggtggttattcttagcggcggcatggagcccattatccgagccctgctcgaacatctcctgggcaaaaaagaggcagcagaaatccagatcgtcagcaatcaagttgaggtgcgcaagggatttaagtccctggatgaagaaggtggttggaacattgtctatcacgatgagtcgcattttggccacgacaagtctcgcgaaattcgtccctatgcagagctgcctgatgaccagcgaccgactatgttttacgccggtgacggagtgtctgacctgtcggccgctaaagagacggacctgctgtttgcgaagaagggtcacgatctgatcacgtattgcgtccgagaaaaggttccatttactattttcgaggactggacgtcgattctttccactgtccaggacgtcgtggcaggaaaaaccacagtgaaggaagtgtacgcggccggaattaaggattttgaacaaggtgcagacaaggcctaacacgaagggtttcccatctgtgtgacctgatccctttttacgtttttttgttttgttttttcttttgttcatgatcaacttgggagtgattcctcttggtgatgtcgaaaattgaactgttataccaatattctgttgcctttgtttcctgtttgtagtttactactttttacagtagtcgttgttcctgccttgcttgcgtttgtcagggtttccctttagcttagtaccaatatctagccttaattttgcttattctttctcaccgcccatgattgatttcaatcatgattaatgatttatgcatgaaaactcaaaatactcaattgtcttgtacaaggcaatcacaagctggtcagccattctcagcgcctataagagctttcagccaggccggccccaaaacgatctaccctgtggacctggctaggctaaactttggaaagtcatgcaattatgaacgtttgaagctcaagcgctcctaccctctcctggagcagtgcttgaagactgagtccgtctcagataacttcgtataatgtatgctatacgaagttatcctgcaggagctcagaccttgcatgttagccttgaccttgcctctatgaccactaattcgcacaagattgcacgttaccattgtcatcttgccatgtatccaatgtttcctgtttgccatagtacgtagtagatacatcgatcatcgatgcagatgacgcagatggcattggttcgctttgccctatgcatgcatcatgcatcatgcatcatgcgtcatgcgtcactatccatattaatcattgccctctgtactaggccatgacacctgcagacccttccccagggatgcttcttgtaatagccaatatactacacaactttaccgattacgatcgagatcgatctcactatagtttgtcgaacttcgatgcacatcgagggtgcggaaaaaagctgacggaagcggaagtgggtgaattggttaatttagttagattggcagggttgttcccaagattcaacgcaagctgagaaagaaaacagaaacacgaggcataaggccagtcagaaaatgcattacgaggggagttgaagtgactgtgggccagtgcctgggtcgtcatgtgcaaattttttcttcggttagactgccgcagcatgcagcaactctgccggccctatataactagtgcttcatcttcttgtcattcttgtctctttaccaacacaccggtactctttcaccatgggtaaggaaaagacacacgtatcgcgaccccgactcaactccaacatggacgcagacctgtacggatacaaatgggctcgagataatgtcggacagtcgggtgcgacgatctacagactctatggaaaaccggacgcccccgagctctttcttaaacacggcaagggtagcgttgcaaacgacgtaaccgacgaaatggtccgtctgaattggctaactgagttcatgccactccccaccatcaagcacttcatccgtacacctgacgatgcgtggctgttgactacggccatccccggtaagaccgcttttcaggtcctcgaggaataccctgactcgggcgagaacatcgtggatgccttggctgtgtttttgcgccgccttcactctattccggtctgcaactgccctttcaacagcgaccgtgtttttaggcttgcccaggcacaatcacgcatgaacaatggtctagtcgacgctagtgatttcgatgacgagcgcaacggctggccggtggaacaagtgtggaaagagatgcataagctcctgcccttttccccagactctgtcgtgacgcatggtgatttctcgcttgacaacctcatctttgacgagggcaagctcattggctgcattgacgtcggccgggttggcatcgccgatcgctaccaagatcttgcgatcctctggaattgtctgggcgagttctcccctagcctccagaagcgtctgttccagaaatatgggatcg

SEQ ID NO: 282 - DNA, 4249 bp, synthetic construct
  source 1..4249: mol_type = other DNA
tggcatgtaggcctgtaggggctatgcctatatgctcatgcactcatgtcgcgatgttgcgatatcgcgatggaccaaccaagcaagcgtgcagcgtgggcgcttgggccaagggtgctaagctaagtgtaagcactgaagtgctgaagtgctgaagtgctgaacgtggaacgtcaggatgacacatcctctcccttcggcttcgtccaagaaaggttggtcagccatctgagatctgagatctgaaatgaatataatgatgaattgagtcgatgagatctgactatcttgggagattgcaccaatgcgccacggtgaccagatggtcttggtcttagctggtatagtggcacctgatctgccttgacagatctcatgttcatacgttcatgcattcaatcttatcgtctagccgtctgcgatctgcccaactagacgacgacaaatgtaattgatccttgtaaccctgttgctggtcgcagcagcgcgatacgatgccgtcacagtatcggcatctctgtctcgacgacagtgagtatagtcaactatgctatctagtagccaaagtaagtctacattccgggctttgcaggggttagctatttcattagacaatacttacaaccttcgaagggcttccccagaattcaattctatattgattcaatatccacccatcggacccgctctccgtaccccctgttcgcttcgccactacaaccatgtcaagacctgagaatcgtagcaaattgccccactacggcccgagtgctgtcggctggttaaagtagaatgacttgggtagccagatcgagacgcctgacattgatacgcagacagcgcagtcagtttcaaactgacaactgacgcgtactggattgacaggactccttggccggtgccattcgaatcgcttgtagacctcttgccagcatcttgccagagaagcttgaaggctggatcgctcagcctgagctcacacttagtagctccactagtcactcaggtgctcagcctctcctcagcgcctcaagctcaagcctcagggcctcagctgcatcgagctctggtgccagtgccagtgccagtgccagtgccagtgccagtgccagtgccagtgaagagagtggtatgagccaagctatacccaaaagcaaatgatggttattgccagcttccatgcacccctggggcgaaggacaacgaacaacagacagagtttgaattattcactggcctagtactaccaatttaaatttggtggttcagcgcaggaacggcgcgagtgagcgtaagggcaaactccgcatggggcgtgacgtcagtgtccctctggctgaggcactccagcaggctctggtcaacgcatcaacgtgtgtgtgtgtctaccaagcacattgtgcgctcgctgtccgtgcgccgaaatcgcaccagtcagaacgtctataaaacccctcttgcttggagggttaccgggccgtcttttcccaacgctccggctcactcactactctacacaacaaatggtgaaggctgttatcttttctgactttgatggcacaatcacttggcaagactccaacgattacctcactgatacgctcggctttggtaaggaagagcgcctgaaaatcttcgagggcgtcttggatggaaccaagccctttcgagagggtttcacacaaatgattagcagcattgagactccactcccagaatgtttggctatcctcaaagaaaaaattcaacttgaccctggattcaagaagacctatgaatggagcctggagcatagcgtccctttgatcgtggtttcctcgggcatgaaaccaattatcaaagcactcttggagaacatgcttggtgaggaagcgatcaaaaatcttgagatcgtggcaaatgacgtcgagcttgatgcaaacaataagatgacggtcacgtaccgcgacgaaactcctttcggtcatgataaatccaagtccattgacaattttaaggcccattacgaggcgcagctgccggaaggagctgaaaagccgacttatttctactgtggcgacggcatctccgatctgtcggcagcgaaagagtgcgatttgctctttgcgaaacgtggtaaagatcttgtgacgtattgcaagcgtcaaaacgtccccttccacgaattcgatacttttgaggatattctccgaagcatgaaccaagtcctcgatggagagaaaacggtttctgagcttatggagaactaacacgaagggtttcccatctgtgtgacctgatccctttttacgtttttttgttttgttttttcttttgttcatgatcaacttgggagtgattcctcttggtgatgtcgaaaattgaactgttataccaatattctgttgcctttgtttcctgtttgtagtttactactttttacagtagtcgttgttcctgccttgcttgcgtttgtcagggtttccctttagcttagtaccaatatctagccttaattttgcttattctttctcaccgcccatgattgatttcaatcatgattaatgatttatgcatgaaaactcaaaatactcaattgtcttgtacaaggcaatcacaagctggtcagccattctcagcgcctataagagctttcagccaggccggccccaaaacgatctaccctgtggacctggctaggctaaactttggaaagtcatgcaattatgaacgtttgaagctcaagcgctcctaccctctcctggagcagtgcttgaagactgagtccgtctcagataacttcgtataatgtatgctatacgaagttatcctgcaggagctcagaccttgcatgttagccttgaccttgcctctatgaccactaattcgcacaagattgcacgttaccattgtcatcttgccatgtatccaatgtttcctgtttgccatagtacgtagtagatacatcgatcatcgatgcagatgacgcagatggcattggttcgctttgccctatgcatgcatcatgcatcatgcatcatgcgtcatgcgtcactatccatattaatcattgccctctgtactaggccatgacacctgcagacccttccccagggatgcttcttgtaatagccaatatactacacaactttaccgattacgatcgagatcgatctcactatagtttgtcgaacttcgatgcacatcgagggtgcggaaaaaagctgacggaagcggaagtgggtgaattggttaatttagttagattggcagggttgttcccaagattcaacgcaagctgagaaagaaaacagaaacacgaggcataaggccagtcagaaaatgcattacgaggggagttgaagtgactgtgggccagtgcctgggtcgtcatgtgcaaattttttcttcggttagactgccgcagcatgcagcaactctgccggccctatataactagtgcttcatcttcttgtcattcttgtctctttaccaacacaccggtactctttcaccatgggtaaggaaaagacacacgtatcgcgaccccgactcaactccaacatggacgcagacctgtacggatacaaatgggctcgagataatgtcggacagtcgggtgcgacgatctacagactctatggaaaaccggacgcccccgagctctttcttaaacacggcaagggtagcgttgcaaacgacgtaaccgacgaaatggtccgtctgaattggctaactgagttcatgccactccccaccatcaagcacttcatccgtacacctgacgatgcgtggctgttgactacggccatccccggtaagaccgcttttcaggtcctcgaggaataccctgactcgggcgagaacatcgtggatgccttggctgtgtttttgcgccgccttcactctattccggtctgcaactgccctttcaacagcgaccgtgtttttaggcttgcccaggcacaatcacgcatgaacaatggtctagtcgacgctagtgatttcgatgacgagcgcaacggctggccggtggaacaagtgtggaaagagatgcataagctcctgcccttttccccagactctgtcgtgacgcatggtgatttctcgcttgacaacctcatctttgacgagggcaagctcattggctgcattgacgtcggccgggttggcatcgccgatcgctaccaagatcttgcgatcctctggaattgtctgggcgagttctcccctagcctccagaagcgtctgttccagaaatatgggatcg

SEQ ID NO: 283 - DNA, 4297 bp, synthetic construct
  source 1..4297: mol_type = other DNA
tggcatgtaggcctgtaggggctatgcctatatgctcatgcactcatgtcgcgatgttgcgatatcgcgatggaccaaccaagcaagcgtgcagcgtgggcgcttgggccaagggtgctaagctaagtgtaagcactgaagtgctgaagtgctgaagtgctgaacgtggaacgtcaggatgacacatcctctcccttcggcttcgtccaagaaaggttggtcagccatctgagatctgagatctgaaatgaatataatgatgaattgagtcgatgagatctgactatcttgggagattgcaccaatgcgccacggtgaccagatggtcttggtcttagctggtatagtggcacctgatctgccttgacagatctcatgttcatacgttcatgcattcaatcttatcgtctagccgtctgcgatctgcccaactagacgacgacaaatgtaattgatccttgtaaccctgttgctggtcgcagcagcgcgatacgatgccgtcacagtatcggcatctctgtctcgacgacagtgagtatagtcaactatgctatctagtagccaaagtaagtctacattccgggctttgcaggggttagctatttcattagacaatacttacaaccttcgaagggcttccccagaattcaattctatattgattcaatatccacccatcggacccgctctccgtaccccctgttcgcttcgccactacaaccatgtcaagacctgagaatcgtagcaaattgccccactacggcccgagtgctgtcggctggttaaagtagaatgacttgggtagccagatcgagacgcctgacattgatacgcagacagcgcagtcagtttcaaactgacaactgacgcgtactggattgacaggactccttggccggtgccattcgaatcgcttgtagacctcttgccagcatcttgccagagaagcttgaaggctggatcgctcagcctgagctcacacttagtagctccactagtcactcaggtgctcagcctctcctcagcgcctcaagctcaagcctcagggcctcagctgcatcgagctctggtgccagtgccagtgccagtgccagtgccagtgccagtgccagtgccagtgaagagagtggtatgagccaagctatacccaaaagcaaatgatggttattgccagcttccatgcacccctggggcgaaggacaacgaacaacagacagagtttgaattattcactggcctagtactaccaatttaaatttggtggttcagcgcaggaacggcgcgagtgagcgtaagggcaaactccgcatggggcgtgacgtcagtgtccctctggctgaggcactccagcaggctctggtcaacgcatcaacgtgtgtgtgtgtctaccaagcacattgtgcgctcgctgtccgtgcgccgaaatcgcaccagtcagaacgtctataaaacccctcttgcttggagggttaccgggccgtcttttcccaacgctccggctcactcactactctacacaacaaatgggttccaccctggacatcgcactccctgcgcttaagactaagccgaagttcatcttcttcacagattttgatggcactattactcaacaagattcgaacgactggatgactgataatttgggatttggcgcggagcttcgcaaaaagggtaatgaggacgtgttgtttggccgtcgcgacttccgtgattctttcgcagatatgctggattccattaagaccccgtttaatgaatgcattgaacttcttctcaaaaacattactcttgatccgggtttcaagcagttcttcgagtgggcaaaagaaaataatgttcccatcgtcattttgtcgggcggaatggaaccagtcatccgcgcgttgttggcacatatgctcggtaaagaagaggcagaaacgcttcaaattgtctcgaacgatgtcgcaccccgtccgggtaagtctgttaatgaggcgggcggatggcacatcgtttaccatgatgacagcggcttcggtcatgacaaatcgcttgaaatccgtccgtacgcacgcctcccggcagaagagcgccctgttctgttttatgcgggtgacggagtctctgacctgtctgctgcgaaagagacggatctcctcttcgcaaaatctggtcgcgatcttgtctcgtattgcgaacgtgagaacgtgccatttaccacgtttcaagattttacagaaatcttggcaacggttaaagacatcgttgcaggcaagacgactgttaaggaagctgccactggacgaaaataacacgaagggtttcccatctgtgtgacctgatccctttttacgtttttttgttttgttttttcttttgttcatgatcaacttgggagtgattcctcttggtgatgtcgaaaattgaactgttataccaatattctgttgcctttgtttcctgtttgtagtttactactttttacagtagtcgttgttcctgccttgcttgcgtttgtcagggtttccctttagcttagtaccaatatctagccttaattttgcttattctttctcaccgcccatgattgatttcaatcatgattaatgatttatgcatgaaaactcaaaatactcaattgtcttgtacaaggcaatcacaagctggtcagccattctcagcgcctataagagctttcagccaggccggccccaaaacgatctaccctgtggacctggctaggctaaactttggaaagtcatgcaattatgaacgtttgaagctcaagcgctcctaccctctcctggagcagtgcttgaagactgagtccgtctcagataacttcgtataatgtatgctatacgaagttatcctgcaggagctcagaccttgcatgttagccttgaccttgcctctatgaccactaattcgcacaagattgcacgttaccattgtcatcttgccatgtatccaatgtttcctgtttgccatagtacgtagtagatacatcgatcatcgatgcagatgacgcagatggcattggttcgctttgccctatgcatgcatcatgcatcatgcatcatgcgtcatgcgtcactatccatattaatcattgccctctgtactaggccatgacacctgcagacccttccccagggatgcttcttgtaatagccaatatactacacaactttaccgattacgatcgagatcgatctcactatagtttgtcgaacttcgatgcacatcgagggtgcggaaaaaagctgacggaagcggaagtgggtgaattggttaatttagttagattggcagggttgttcccaagattcaacgcaagctgagaaagaaaacagaaacacgaggcataaggccagtcagaaaatgcattacgaggggagttgaagtgactgtgggccagtgcctgggtcgtcatgtgcaaattttttcttcggttagactgccgcagcatgcagcaactctgccggccctatataactagtgcttcatcttcttgtcattcttgtctctttaccaacacaccggtactctttcaccatgggtaaggaaaagacacacgtatcgcgaccccgactcaactccaacatggacgcagacctgtacggatacaaatgggctcgagataatgtcggacagtcgggtgcgacgatctacagactctatggaaaaccggacgcccccgagctctttcttaaacacggcaagggtagcgttgcaaacgacgtaaccgacgaaatggtccgtctgaattggctaactgagttcatgccactccccaccatcaagcacttcatccgtacacctgacgatgcgtggctgttgactacggccatccccggtaagaccgcttttcaggtcctcgaggaataccctgactcgggcgagaacatcgtggatgccttggctgtgtttttgcgccgccttcactctattccggtctgcaactgccctttcaacagcgaccgtgtttttaggcttgcccaggcacaatcacgcatgaacaatggtctagtcgacgctagtgatttcgatgacgagcgcaacggctggccggtggaacaagtgtggaaagagatgcataagctcctgcccttttccccagactctgtcgtgacgcatggtgatttctcgcttgacaacctcatctttgacgagggcaagctcattggctgcattgacgtcggccgggttggcatcgccgatcgctaccaagatcttgcgatcctctggaattgtctgggcgagttctcccctagcctccagaagcgtctgttccagaaatatgggatcg

SEQ ID NO: 284 - DNA, 4246 bp, synthetic construct
  source 1..4246: mol_type = other DNA
tggcatgtaggcctgtaggggctatgcctatatgctcatgcactcatgtcgcgatgttgcgatatcgcgatggaccaaccaagcaagcgtgcagcgtgggcgcttgggccaagggtgctaagctaagtgtaagcactgaagtgctgaagtgctgaagtgctgaacgtggaacgtcaggatgacacatcctctcccttcggcttcgtccaagaaaggttggtcagccatctgagatctgagatctgaaatgaatataatgatgaattgagtcgatgagatctgactatcttgggagattgcaccaatgcgccacggtgaccagatggtcttggtcttagctggtatagtggcacctgatctgccttgacagatctcatgttcatacgttcatgcattcaatcttatcgtctagccgtctgcgatctgcccaactagacgacgacaaatgtaattgatccttgtaaccctgttgctggtcgcagcagcgcgatacgatgccgtcacagtatcggcatctctgtctcgacgacagtgagtatagtcaactatgctatctagtagccaaagtaagtctacattccgggctttgcaggggttagctatttcattagacaatacttacaaccttcgaagggcttccccagaattcaattctatattgattcaatatccacccatcggacccgctctccgtaccccctgttcgcttcgccactacaaccatgtcaagacctgagaatcgtagcaaattgccccactacggcccgagtgctgtcggctggttaaagtagaatgacttgggtagccagatcgagacgcctgacattgatacgcagacagcgcagtcagtttcaaactgacaactgacgcgtactggattgacaggactccttggccggtgccattcgaatcgcttgtagacctcttgccagcatcttgccagagaagcttgaaggctggatcgctcagcctgagctcacacttagtagctccactagtcactcaggtgctcagcctctcctcagcgcctcaagctcaagcctcagggcctcagctgcatcgagctctggtgccagtgccagtgccagtgccagtgccagtgccagtgccagtgccagtgaagagagtggtatgagccaagctatacccaaaagcaaatgatggttattgccagcttccatgcacccctggggcgaaggacaacgaacaacagacagagtttgaattattcactggcctagtactaccaatttaaatttggtggttcagcgcaggaacggcgcgagtgagcgtaagggcaaactccgcatggggcgtgacgtcagtgtccctctggctgaggcactccagcaggctctggtcaacgcatcaacgtgtgtgtgtgtctaccaagcacattgtgcgctcgctgtccgtgcgccgaaatcgcaccagtcagaacgtctataaaacccctcttgcttggagggttaccgggccgtcttttcccaacgctccggctcactcactactctacacaacaaatggtgaaagctgtcatcttttcggattttgacggtacgatcacactccaggattccaatgacttcttggtcgataataagggaatgggaaagaatgatcgtttgaaacttttcgagggtgtcttgaatggcacgaaaaattttcgtgacatcttcagcgacatgctgggtagcctgaatcttacccaggaagagggtattgagttcttgaaagagaatatcgaacttgacccaggattcaaaaagacgttcctgtgggcccaagaaaacaacgtcccgcttattgtcgtttcgtccggaaccgttccggtgattcgtgcactccttactaagatgatcggttccgacattgagaaacttgacatcgtctctaatgacctggaggtgaatgaatcgaaccactggaccgttctttaccgcgactcgactccacacggtcatgacaagagcaagacaattgacgactataaatctaaatacgaatcccaacttgtcgagggtgaggagcgtccggtctatttctactgcggcgacggtatctccgacctcactgcagccaaagagtgtgaccttttgtttgccaaggcaggtaaggatctcatcacattttgtaaaaagcagaacgtgccctatcacgagtttaatacatgggatgacatcctgcgctcgatgaaagcggtcctgaacggagaaaaaacagtgaaggaacttatggagaattaacacgaagggtttcccatctgtgtgacctgatccctttttacgtttttttgttttgttttttcttttgttcatgatcaacttgggagtgattcctcttggtgatgtcgaaaattgaactgttataccaatattctgttgcctttgtttcctgtttgtagtttactactttttacagtagtcgttgttcctgccttgcttgcgtttgtcagggtttccctttagcttagtaccaatatctagccttaattttgcttattctttctcaccgcccatgattgatttcaatcatgattaatgatttatgcatgaaaactcaaaatactcaattgtcttgtacaaggcaatcacaagctggtcagccattctcagcgcctataagagctttcagccaggccggccccaaaacgatctaccctgtggacctggctaggctaaactttggaaagtcatgcaattatgaacgtttgaagctcaagcgctcctaccctctcctggagcagtgcttgaagactgagtccgtctcagataacttcgtataatgtatgctatacgaagttatcctgcaggagctcagaccttgcatgttagccttgaccttgcctctatgaccactaattcgcacaagattgcacgttaccattgtcatcttgccatgtatccaatgtttcctgtttgccatagtacgtagtagatacatcgatcatcgatgcagatgacgcagatggcattggttcgctttgccctatgcatgcatcatgcatcatgcatcatgcgtcatgcgtcactatccatattaatcattgccctctgtactaggccatgacacctgcagacccttccccagggatgcttcttgtaatagccaatatactacacaactttaccgattacgatcgagatcgatctcactatagtttgtcgaacttcgatgcacatcgagggtgcggaaaaaagctgacggaagcggaagtgggtgaattggttaatttagttagattggcagggttgttcccaagattcaacgcaagctgagaaagaaaacagaaacacgaggcataaggccagtcagaaaatgcattacgaggggagttgaagtgactgtgggccagtgcctgggtcgtcatgtgcaaattttttcttcggttagactgccgcagcatgcagcaactctgccggccctatataactagtgcttcatcttcttgtcattcttgtctctttaccaacacaccggtactctttcaccatgggtaaggaaaagacacacgtatcgcgaccccgactcaactccaacatggacgcagacctgtacggatacaaatgggctcgagataatgtcggacagtcgggtgcgacgatctacagactctatggaaaaccggacgcccccgagctctttcttaaacacggcaagggtagcgttgcaaacgacgtaaccgacgaaatggtccgtctgaattggctaactgagttcatgccactccccaccatcaagcacttcatccgtacacctgacgatgcgtggctgttgactacggccatccccggtaagaccgcttttcaggtcctcgaggaataccctgactcgggcgagaacatcgtggatgccttggctgtgtttttgcgccgccttcactctattccggtctgcaactgccctttcaacagcgaccgtgtttttaggcttgcccaggcacaatcacgcatgaacaatggtctagtcgacgctagtgatttcgatgacgagcgcaacggctggccggtggaacaagtgtggaaagagatgcataagctcctgcccttttccccagactctgtcgtgacgcatggtgatttctcgcttgacaacctcatctttgacgagggcaagctcattggctgcattgacgtcggccgggttggcatcgccgatcgctaccaagatcttgcgatcctctggaattgtctgggcgagttctcccctagcctccagaagcgtctgttccagaaatatgggatcg

SEQ ID NO: 285 - DNA, 4249 bp, synthetic construct
  source 1..4249: mol_type = other DNA
tggcatgtaggcctgtaggggctatgcctatatgctcatgcactcatgtcgcgatgttgcgatatcgcgatggaccaaccaagcaagcgtgcagcgtgggcgcttgggccaagggtgctaagctaagtgtaagcactgaagtgctgaagtgctgaagtgctgaacgtggaacgtcaggatgacacatcctctcccttcggcttcgtccaagaaaggttggtcagccatctgagatctgagatctgaaatgaatataatgatgaattgagtcgatgagatctgactatcttgggagattgcaccaatgcgccacggtgaccagatggtcttggtcttagctggtatagtggcacctgatctgccttgacagatctcatgttcatacgttcatgcattcaatcttatcgtctagccgtctgcgatctgcccaactagacgacgacaaatgtaattgatccttgtaaccctgttgctggtcgcagcagcgcgatacgatgccgtcacagtatcggcatctctgtctcgacgacagtgagtatagtcaactatgctatctagtagccaaagtaagtctacattccgggctttgcaggggttagctatttcattagacaatacttacaaccttcgaagggcttccccagaattcaattctatattgattcaatatccacccatcggacccgctctccgtaccccctgttcgcttcgccactacaaccatgtcaagacctgagaatcgtagcaaattgccccactacggcccgagtgctgtcggctggttaaagtagaatgacttgggtagccagatcgagacgcctgacattgatacgcagacagcgcagtcagtttcaaactgacaactgacgcgtactggattgacaggactccttggccggtgccattcgaatcgcttgtagacctcttgccagcatcttgccagagaagcttgaaggctggatcgctcagcctgagctcacacttagtagctccactagtcactcaggtgctcagcctctcctcagcgcctcaagctcaagcctcagggcctcagctgcatcgagctctggtgccagtgccagtgccagtgccagtgccagtgccagtgccagtgccagtgaagagagtggtatgagccaagctatacccaaaagcaaatgatggttattgccagcttccatgcacccctggggcgaaggacaacgaacaacagacagagtttgaattattcactggcctagtactaccaatttaaatttggtggttcagcgcaggaacggcgcgagtgagcgtaagggcaaactccgcatggggcgtgacgtcagtgtccctctggctgaggcactccagcaggctctggtcaacgcatcaacgtgtgtgtgtgtctaccaagcacattgtgcgctcgctgtccgtgcgccgaaatcgcaccagtcagaacgtctataaaacccctcttgcttggagggttaccgggccgtcttttcccaacgctccggctcactcactactctacacaacaaatggtcaaggcagtcatcttcacggactttgatggcactgtcaccctggaggatagcaacgattacctcacagacacacttggattcggcaaagaggaacgcctgaaagtttttgagggcgtgcttgatggaaccaaatcttttcgtcaaggtttcatggaaatgcttgagtctatccacactccttttcctgagtgcatcaaaattcttgaaaaaaaaatccgactcgatcctggctttaaagatacctttgaatgggcgcaagagaatgatgttcctgttgtggtcgtgtcgtctggaatgaagcccattatcaaagtgctgttgactcgattggtgggtcaacactcgatccataagattgacatcgtttcgaatgaggttgaaattgaggcgcacgatgaatggaaaatcatctataaggacgaaagcccctttggtcatgacaagtcgcgctcgattgacgcatataagaaaaaatttgaatccgccctgaaacctggagatgaacgcccagtttacttttactgcggagatggtgtcagcgatctgtccgccgcaaaagaatgtgatcttctgtttgccaaacgtggaaaggacctggtgacctactgcaagcgtcaaaatgtgccctttcacgaatttgacactttcgaagacatccttgcctccatgaaacaagtcctcgccggagaaaaaactgttacggagcttatggagaattaacacgaagggtttcccatctgtgtgacctgatccctttttacgtttttttgttttgttttttcttttgttcatgatcaacttgggagtgattcctcttggtgatgtcgaaaattgaactgttataccaatattctgttgcctttgtttcctgtttgtagtttactactttttacagtagtcgttgttcctgccttgcttgcgtttgtcagggtttccctttagcttagtaccaatatctagccttaattttgcttattctttctcaccgcccatgattgatttcaatcatgattaatgatttatgcatgaaaactcaaaatactcaattgtcttgtacaaggcaatcacaagctggtcagccattctcagcgcctataagagctttcagccaggccggccccaaaacgatctaccctgtggacctggctaggctaaactttggaaagtcatgcaattatgaacgtttgaagctcaagcgctcctaccctctcctggagcagtgcttgaagactgagtccgtctcagataacttcgtataatgtatgctatacgaagttatcctgcaggagctcagaccttgcatgttagccttgaccttgcctctatgaccactaattcgcacaagattgcacgttaccattgtcatcttgccatgtatccaatgtttcctgtttgccatagtacgtagtagatacatcgatcatcgatgcagatgacgcagatggcattggttcgctttgccctatgcatgcatcatgcatcatgcatcatgcgtcatgcgtcactatccatattaatcattgccctctgtactaggccatgacacctgcagacccttccccagggatgcttcttgtaatagccaatatactacacaactttaccgattacgatcgagatcgatctcactatagtttgtcgaacttcgatgcacatcgagggtgcggaaaaaagctgacggaagcggaagtgggtgaattggttaatttagttagattggcagggttgttcccaagattcaacgcaagctgagaaagaaaacagaaacacgaggcataaggccagtcagaaaatgcattacgaggggagttgaagtgactgtgggccagtgcctgggtcgtcatgtgcaaattttttcttcggttagactgccgcagcatgcagcaactctgccggccctatataactagtgcttcatcttcttgtcattcttgtctctttaccaacacaccggtactctttcaccatgggtaaggaaaagacacacgtatcgcgaccccgactcaactccaacatggacgcagacctgtacggatacaaatgggctcgagataatgtcggacagtcgggtgcgacgatctacagactctatggaaaaccggacgcccccgagctctttcttaaacacggcaagggtagcgttgcaaacgacgtaaccgacgaaatggtccgtctgaattggctaactgagttcatgccactccccaccatcaagcacttcatccgtacacctgacgatgcgtggctgttgactacggccatccccggtaagaccgcttttcaggtcctcgaggaataccctgactcgggcgagaacatcgtggatgccttggctgtgtttttgcgccgccttcactctattccggtctgcaactgccctttcaacagcgaccgtgtttttaggcttgcccaggcacaatcacgcatgaacaatggtctagtcgacgctagtgatttcgatgacgagcgcaacggctggccggtggaacaagtgtggaaagagatgcataagctcctgcccttttccccagactctgtcgtgacgcatggtgatttctcgcttgacaacctcatctttgacgagggcaagctcattggctgcattgacgtcggccgggttggcatcgccgatcgctaccaagatcttgcgatcctctggaattgtctgggcgagttctcccctagcctccagaagcgtctgttccagaaatatgggatcg

SEQ ID NO: 286 - DNA, 4237 bp, synthetic construct
  source 1..4237: mol_type = other DNA
tggcatgtaggcctgtaggggctatgcctatatgctcatgcactcatgtcgcgatgttgcgatatcgcgatggaccaaccaagcaagcgtgcagcgtgggcgcttgggccaagggtgctaagctaagtgtaagcactgaagtgctgaagtgctgaagtgctgaacgtggaacgtcaggatgacacatcctctcccttcggcttcgtccaagaaaggttggtcagccatctgagatctgagatctgaaatgaatataatgatgaattgagtcgatgagatctgactatcttgggagattgcaccaatgcgccacggtgaccagatggtcttggtcttagctggtatagtggcacctgatctgccttgacagatctcatgttcatacgttcatgcattcaatcttatcgtctagccgtctgcgatctgcccaactagacgacgacaaatgtaattgatccttgtaaccctgttgctggtcgcagcagcgcgatacgatgccgtcacagtatcggcatctctgtctcgacgacagtgagtatagtcaactatgctatctagtagccaaagtaagtctacattccgggctttgcaggggttagctatttcattagacaatacttacaaccttcgaagggcttccccagaattcaattctatattgattcaatatccacccatcggacccgctctccgtaccccctgttcgcttcgccactacaaccatgtcaagacctgagaatcgtagcaaattgccccactacggcccgagtgctgtcggctggttaaagtagaatgacttgggtagccagatcgagacgcctgacattgatacgcagacagcgcagtcagtttcaaactgacaactgacgcgtactggattgacaggactccttggccggtgccattcgaatcgcttgtagacctcttgccagcatcttgccagagaagcttgaaggctggatcgctcagcctgagctcacacttagtagctccactagtcactcaggtgctcagcctctcctcagcgcctcaagctcaagcctcagggcctcagctgcatcgagctctggtgccagtgccagtgccagtgccagtgccagtgccagtgccagtgccagtgaagagagtggtatgagccaagctatacccaaaagcaaatgatggttattgccagcttccatgcacccctggggcgaaggacaacgaacaacagacagagtttgaattattcactggcctagtactaccaatttaaatttggtggttcagcgcaggaacggcgcgagtgagcgtaagggcaaactccgcatggggcgtgacgtcagtgtccctctggctgaggcactccagcaggctctggtcaacgcatcaacgtgtgtgtgtgtctaccaagcacattgtgcgctcgctgtccgtgcgccgaaatcgcaccagtcagaacgtctataaaacccctcttgcttggagggttaccgggccgtcttttcccaacgctccggctcactcactactctacacaacaaatggtcaacgcggttatcttcacggactttgacggtactgtgacctggcaagacagcaacgacttcctcacggataccaagggttttggtaaggaggaacgctctaaggtgttcgaaggcgtgttggacggcaccaaatcgtttcgtgacggattttgggacatgctcgagtctgtgaaaaccccattcccggaatgcgttaaacttgtggaggagaatatccaacttgacccaggctttaaagatacttttgaatgggctcaagaaaatggcgtgcccattgttgtgatcagcagcggaatgcgtcccctcattaaggctcttcttgcacgactggttggaccagaagccatcgaaaagattgacattgttagcaacgaggttgagatcgactctgacggccagtggcgtattgtctacaaggatgacagctcttttggacacgacaagtccaaatccatcaccgcctataagaaacaattcgaagctgcaggtaaaaaaccgacctatttttactgcggtgacggcgtctcggatcttagcgcggcaaaagagtgcgacctgttgttcgctaagcgcggaaaggatctggtgacctactgtaagcgcgaacacgtcccattccatgagtttgataccttcgaggacattctttcgtcgatgaaagatgttctcgcaggcaagaagacagttacagagttgatgcagaattaacacgaagggtttcccatctgtgtgacctgatccctttttacgtttttttgttttgttttttcttttgttcatgatcaacttgggagtgattcctcttggtgatgtcgaaaattgaactgttataccaatattctgttgcctttgtttcctgtttgtagtttactactttttacagtagtcgttgttcctgccttgcttgcgtttgtcagggtttccctttagcttagtaccaatatctagccttaattttgcttattctttctcaccgcccatgattgatttcaatcatgattaatgatttatgcatgaaaactcaaaatactcaattgtcttgtacaaggcaatcacaagctggtcagccattctcagcgcctataagagctttcagccaggccggccccaaaacgatctaccctgtggacctggctaggctaaactttggaaagtcatgcaattatgaacgtttgaagctcaagcgctcctaccctctcctggagcagtgcttgaagactgagtccgtctcagataacttcgtataatgtatgctatacgaagttatcctgcaggagctcagaccttgcatgttagccttgaccttgcctctatgaccactaattcgcacaagattgcacgttaccattgtcatcttgccatgtatccaatgtttcctgtttgccatagtacgtagtagatacatcgatcatcgatgcagatgacgcagatggcattggttcgctttgccctatgcatgcatcatgcatcatgcatcatgcgtcatgcgtcactatccatattaatcattgccctctgtactaggccatgacacctgcagacccttccccagggatgcttcttgtaatagccaatatactacacaactttaccgattacgatcgagatcgatctcactatagtttgtcgaacttcgatgcacatcgagggtgcggaaaaaagctgacggaagcggaagtgggtgaattggttaatttagttagattggcagggttgttcccaagattcaacgcaagctgagaaagaaaacagaaacacgaggcataaggccagtcagaaaatgcattacgaggggagttgaagtgactgtgggccagtgcctgggtcgtcatgtgcaaattttttcttcggttagactgccgcagcatgcagcaactctgccggccctatataactagtgcttcatcttcttgtcattcttgtctctttaccaacacaccggtactctttcaccatgggtaaggaaaagacacacgtatcgcgaccccgactcaactccaacatggacgcagacctgtacggatacaaatgggctcgagataatgtcggacagtcgggtgcgacgatctacagactctatggaaaaccggacgcccccgagctctttcttaaacacggcaagggtagcgttgcaaacgacgtaaccgacgaaatggtccgtctgaattggctaactgagttcatgccactccccaccatcaagcacttcatccgtacacctgacgatgcgtggctgttgactacggccatccccggtaagaccgcttttcaggtcctcgaggaataccctgactcgggcgagaacatcgtggatgccttggctgtgtttttgcgccgccttcactctattccggtctgcaactgccctttcaacagcgaccgtgtttttaggcttgcccaggcacaatcacgcatgaacaatggtctagtcgacgctagtgatttcgatgacgagcgcaacggctggccggtggaacaagtgtggaaagagatgcataagctcctgcccttttccccagactctgtcgtgacgcatggtgatttctcgcttgacaacctcatctttgacgagggcaagctcattggctgcattgacgtcggccgggttggcatcgccgatcgctaccaagatcttgcgatcctctggaattgtctgggcgagttctcccctagcctccagaagcgtctgttccagaaatatgggatcg

SEQ ID NO: 287 - DNA, 4174 bp, synthetic construct
  source 1..4174: mol_type = other DNA
tggcatgtaggcctgtaggggctatgcctatatgctcatgcactcatgtcgcgatgttgcgatatcgcgatggaccaaccaagcaagcgtgcagcgtgggcgcttgggccaagggtgctaagctaagtgtaagcactgaagtgctgaagtgctgaagtgctgaacgtggaacgtcaggatgacacatcctctcccttcggcttcgtccaagaaaggttggtcagccatctgagatctgagatctgaaatgaatataatgatgaattgagtcgatgagatctgactatcttgggagattgcaccaatgcgccacggtgaccagatggtcttggtcttagctggtatagtggcacctgatctgccttgacagatctcatgttcatacgttcatgcattcaatcttatcgtctagccgtctgcgatctgcccaactagacgacgacaaatgtaattgatccttgtaaccctgttgctggtcgcagcagcgcgatacgatgccgtcacagtatcggcatctctgtctcgacgacagtgagtatagtcaactatgctatctagtagccaaagtaagtctacattccgggctttgcaggggttagctatttcattagacaatacttacaaccttcgaagggcttccccagaattcaattctatattgattcaatatccacccatcggacccgctctccgtaccccctgttcgcttcgccactacaaccatgtcaagacctgagaatcgtagcaaattgccccactacggcccgagtgctgtcggctggttaaagtagaatgacttgggtagccagatcgagacgcctgacattgatacgcagacagcgcagtcagtttcaaactgacaactgacgcgtactggattgacaggactccttggccggtgccattcgaatcgcttgtagacctcttgccagcatcttgccagagaagcttgaaggctggatcgctcagcctgagctcacacttagtagctccactagtcactcaggtgctcagcctctcctcagcgcctcaagctcaagcctcagggcctcagctgcatcgagctctggtgccagtgccagtgccagtgccagtgccagtgccagtgccagtgccagtgaagagagtggtatgagccaagctatacccaaaagcaaatgatggttattgccagcttccatgcacccctggggcgaaggacaacgaacaacagacagagtttgaattattcactggcctagtactaccaatttaaatttggtggttcagcgcaggaacggcgcgagtgagcgtaagggcaaactccgcatggggcgtgacgtcagtgtccctctggctgaggcactccagcaggctctggtcaacgcatcaacgtgtgtgtgtgtctaccaagcacattgtgcgctcgctgtccgtgcgccgaaatcgcaccagtcagaacgtctataaaacccctcttgcttggagggttaccgggccgtcttttcccaacgctccggctcactcactactctacacaacaaatgcgctgtaaaggctttcttttcgacttggacggtacgttggtcgactcgctgcccgcagtcgagcgagcgtggtctaattgggctcgacgacatggacttgcgcccgaagaagtcctcgcatttattcatggaaaacaggctattacgtcgttgcgtcactttatggcaggaaagtccgaagcggacatcgctgccgaatttacccgcttggagcacatcgaggcaactgagactgaaggtattactgcgttgccaggcgctattgcactgctttcccatctcaataaggctggcattccatgggccatcgttacttctggttcgatgcctgtggcccgcgcccgccataagatcgctggactgcccgcaccagaggttttcgttacggccgaacgagtcaaacgcggtaagcccgagcccgatgcctatctcctcggtgcacaattgcttggcttggcgccacaggagtgtgtggtggtcgaggatgcacccgcgggtgtcctctctggactggccgctggttgccacgtcatcgcagtgaacgcaccagcggatacaccccgcctgaatgaagttgatttggtgctccattccctggaacagatcacagtcacgaagcagcctaatggcgacgtgattattcaataacacgaagggtttcccatctgtgtgacctgatccctttttacgtttttttgttttgttttttcttttgttcatgatcaacttgggagtgattcctcttggtgatgtcgaaaattgaactgttataccaatattctgttgcctttgtttcctgtttgtagtttactactttttacagtagtcgttgttcctgccttgcttgcgtttgtcagggtttccctttagcttagtaccaatatctagccttaattttgcttattctttctcaccgcccatgattgatttcaatcatgattaatgatttatgcatgaaaactcaaaatactcaattgtcttgtacaaggcaatcacaagctggtcagccattctcagcgcctataagagctttcagccaggccggccccaaaacgatctaccctgtggacctggctaggctaaactttggaaagtcatgcaattatgaacgtttgaagctcaagcgctcctaccctctcctggagcagtgcttgaagactgagtccgtctcagataacttcgtataatgtatgctatacgaagttatcctgcaggagctcagaccttgcatgttagccttgaccttgcctctatgaccactaattcgcacaagattgcacgttaccattgtcatcttgccatgtatccaatgtttcctgtttgccatagtacgtagtagatacatcgatcatcgatgcagatgacgcagatggcattggttcgctttgccctatgcatgcatcatgcatcatgcatcatgcgtcatgcgtcactatccatattaatcattgccctctgtactaggccatgacacctgcagacccttccccagggatgcttcttgtaatagccaatatactacacaactttaccgattacgatcgagatcgatctcactatagtttgtcgaacttcgatgcacatcgagggtgcggaaaaaagctgacggaagcggaagtgggtgaattggttaatttagttagattggcagggttgttcccaagattcaacgcaagctgagaaagaaaacagaaacacgaggcataaggccagtcagaaaatgcattacgaggggagttgaagtgactgtgggccagtgcctgggtcgtcatgtgcaaattttttcttcggttagactgccgcagcatgcagcaactctgccggccctatataactagtgcttcatcttcttgtcattcttgtctctttaccaacacaccggtactctttcaccatgggtaaggaaaagacacacgtatcgcgaccccgactcaactccaacatggacgcagacctgtacggatacaaatgggctcgagataatgtcggacagtcgggtgcgacgatctacagactctatggaaaaccggacgcccccgagctctttcttaaacacggcaagggtagcgttgcaaacgacgtaaccgacgaaatggtccgtctgaattggctaactgagttcatgccactccccaccatcaagcacttcatccgtacacctgacgatgcgtggctgttgactacggccatccccggtaagaccgcttttcaggtcctcgaggaataccctgactcgggcgagaacatcgtggatgccttggctgtgtttttgcgccgccttcactctattccggtctgcaactgccctttcaacagcgaccgtgtttttaggcttgcccaggcacaatcacgcatgaacaatggtctagtcgacgctagtgatttcgatgacgagcgcaacggctggccggtggaacaagtgtggaaagagatgcataagctcctgcccttttccccagactctgtcgtgacgcatggtgatttctcgcttgacaacctcatctttgacgagggcaagctcattggctgcattgacgtcggccgggttggcatcgccgatcgctaccaagatcttgcgatcctctggaattgtctgggcgagttctcccctagcctccagaagcgtctgttccagaaatatgggatcg

SEQ ID NO: 288 - DNA, 8167 bp, synthetic construct
  source 1..8167: mol_type = other DNA
accgcctctccccgcgcgttggccgattcattaatgcagctggcacgacaggtttcccgactggaaagcgggcagtgagcgcaacgcaattaatgtgagttagctcactcattaggcaccccaggctttacactttatgcttccggctcgtatgttgtgtggaattgtgagcggataacaatttcacacaggaaacagctatgaccatgattacgccaagctatttaggtgacactatagaatactcaagctatgcatcaagcttggtaccgagctcggatccactagtcctgcaggtatcagatctcagatctcagagagatgtcagagcagacctcgcccttacaaagacacttgtacaaaagttttcaggcatacggattccttcccttcctcgcagaaactctctatcgcccctttgcacttgccgccgtttggtattggacaattgattgctagcaccccttgcaatgatgttatacaaatttatctactgaattgcttgagagtcagtaacaccacggcttccgcgcgagattccatcaccaggcggtggtcacacagatgagttcatcaacgggattctgtcaagtatctcgcatcaacaaatttagctaacaagtctgaacacgttctattcaaattcagaagccacaagaagataactttagtaggaaaagtagattgcaagcacactccgaggcttgctctcgggcgaagaagggatattttgggctcagagcgccatcagaacgacggacgctccaacaaaggggaagcaacagtggtgaacaccattaggggcagggcatagacatgtatagcgcttgctccccgtcagaagcagtaccgtcatacaatgccgtgtcgaggccacacaaggtgaaacccattcggcgataagcgtgaatagcaggagcatttacattggtaacttcaagccataagtgacccgccccacgctctcgagcgaattccgtagctagacccatcagtgctcgtcccacgccatgaccacgatgttctggcgcgacttcgatatcttcgacggtcaatctacggttccaccccgagtaggacacaacaacaaatccggccaggtcaccatcatcaccgtatgcgacgaaagtgcgcgagtcaggatcaccatcttcgccatcatcgctctcgtcatcactctcatcatctggaaatactttcgtcaatggcggatctacaggcacttcacggagagtaaatccgtcaccagtagctgtcacgcgaaaaactgtgtctgtggtgaatgatccatcaagggcttcaattgcttctgcatcgcccggtactgatgtcctataacggtaggcggtatcatctaaagtcgttcccatggtgaaagagtaccggtgtgttggtaaagagacaagaatgacaagaagatgaagcactagttatatagggccggcagagttgctgcatgctgcggcagtctaaccgaagaaaaaatttgcacatgacgacccaggcactggcccacagtcacttcaactcccctcgtaatgcattttctgactggccttatgcctcgtgtttctgttttctttctcagcttgcgttgaatcttgggaacaaccctgccaatctaactaaattaaccaattcacccacttccgcttccgtcagcttttttccgcaccctcgatgtgcatcgaagttcgacaaactatagtgagatcgatctcgatcgtaatcggtaaagttgtgtagtatattggctattacaagaagcatccctggggaagggtctgcaggtgtcatggcctagtacagagggcaatgattaatatggatagtgacgcatgatgcatgatgcatgatgcatgatggatgcatagggcaaagcgaaccaatgccatctgcgtcatctgcatcgatgatcgatgtatctactacgtactatggcaaacaggaaacattggatacatggcaagatgacaatggtaacgtgcaatcttgtgcgaattagtggtcatagaggcaaggtcaaggctaacatgcaaggtctgagctcctgcaggactagtaacggccgccagtgtggcgcgccattgtcattcgtgattctagtactgtgggtggctgcgaaactccttcactcaatgaattacaatcatgattcgtgattcgcaccgatcccaccagcctctcgagaaaagcggacttgaacattcatgattcacgaccctgtgattcatgaatgccatccgatccagaacggacttgctactcacgactcagactgaatttttaaatgccctcatgatttgattcatgatcagcaatgccctcatgatttgattcatgattcgctgatcacagcggtgaagaacgtaacccattcacgattcagaaggcaagtactgcttcttgctcggctgctttgttgctgccgaggcgggctagcttgcacaaagatcgaggatcggtaatggcgcgccaggcggccgctcgacgacagtgagtatagtcaactatgctatctagtagccaaagtaagtctacattccgggctttgcaggggttagctatttcattagacaatacttacaaccttcgaagggcttccccagaattcaattctatattgattcaatatccacccatcggacccgctctccgtaccccctgttcgcttcgccactacaaccatgtcaagacctgagaatcgtagcaaattgccccactacggcccgagtgctgtcggctggttaaagtagaatgacttgggtagccagatcgagacgcctgacattgatacgcagacagcgcagtcagtttcaaactgacaactgacgcgtactggattgacaggactccttggccggtgccattcgaatcgcttgtagacctcttgccagcatcttgccagagaagcttgaaggctggatcgctcagcctgagctcacacttagtagctccactagtcactcaggtgctcagcctctcctcagcgcctcaagctcaagcctcagggcctcagctgcatcgagctctggtgccagtgccagtgccagtgccagtgccagtgccagtgccagtgccagtgaagagagtggtatgagccaagctatacccaaaagcaaatgatggttattgccagcttccatgcacccctggggcgaaggacaacgaacaacagacagagtttgaattattcactggcctagtactaccaatttaaatttggtggttcagcgcaggaacggcgcgagtgagcgtaagggcaaactccgcatggggcgtgacgtcagtgtccctctggctgaggcactccagcaggctctggtcaacgcatcaacgtgtgtgtgtgtctaccaagcacattgtgcgctcgctgtccgtgcgccgaaatcgcaccagtcagaacgtctataaaacccctcttgcttggagggttaccgggccgtcttttcccaacgctccggctcactcactactctacacaacaatgtccaacttgctcaccgtccaccagaacctcccggccctgccagtggacgcgaccagcgatgaagttcgaaaaaatcttatggatatgttccgcgatcgacaagccttttccgaacatacctggaagatgctgttgagcgtgtgccgatcgtgggccgcttggtgcaaactgaacaaccgcaagtggtttcccgccgagccggaagatgttcgtgattacctgctctacctgcaagcacgtggtttggcggtgaagactatccaacagcacctgggtcaacttaatatgcttcaccgccgatctggactcccacgtccctctgactccaacgctgtgtcccttgttatgcgtcgtattcgcaaagaaaacgtggacgctggcgaacgagcgaaacaggctttggcatttgaacgaactgacttcgatcaggtccgctccttgatggaaaactctgaccgttgccaagacatccgtaacctcgcgttcctgggaatcgcctacaataccctcctccgtatcgctgaaattgctcgcattcgagtgaaggacatttctcgaacagacggcggccgtatgcttattcatatcggtcgtactaaaacactcgtcagcactgctggagtcgagaaagcgctctctcttggagttactaaattggtggaacgatggatttctgtttctggagttgcggatgatcctaataactacttgttttgtcgtgttcgtaagaacggcgtcgccgcgccctccgccacatcccagctctccacacgtgcactcgagggaatcttcgaggcgactcaccgtctgatttacggcgctaaagacgatagcggtcaacgataccttgcctggtctggtcactccgcacgagtgggcgcagcccgcgacatggcgcgtgcaggagtgtccattccagaaatcatgcaagcgggcggatggacgaacgtcaacatcgtgatgaattatattcgtaacttggactcggaaaccggagcaatggtccgacttctcgaggatggcgattaagttgctccctttgctgttctatgatccaaaagatgcttagtgctccactctctactcccgactaccttttacgcattctgacatgactagtagtgcaatgttacccctggtgttttctcgcaatcactttctgtctgctatagcttttgatcgtcagtagttttttggtatagctaaagtagacttttgtacctggcgttcaatgtaattttactccttttttgtgcgatgcaacagatggtgtaaagatcgtcgttaaagttttggcttgatgcttgattcggtgacggttgcttgggtgatccttatatcgtctcctggtgttctcataagcccaggctcttcttagctatgtacaacaggtccaccactgactatgttatgtagaggcatgcatttaacttacggaaagatttaatggagaagaacgtacctagtcagatgcttgacatgaaaacgtattcctgcaattcacaaatcagtatcctgcctgtccactctctagagggcccaattcgccctatagtgagtcgtattacaattcactggccgtcgttttacaacgtcgtgactgggaaaaccctggcgttacccaacttaatcgccttgcagcacatccccctttcgccagctggcgtaatagcgaagaggcccgcaccgatcgcccttcccaacagttgcgcagcctatacgtacggcagtttaaggtttacacctataaaagagagagccgttatcgtctgtttgtggatgtacagagtgatattattgacacgccggggcgacggatggtgatccccctggccagtgcacgtctgctgtcagataaagtctcccgtgaactttacccggtggtgcatatcggggatgaaagctggcgcatgatgaccaccgatatggccagtgtgccggtctccgttatcggggaagaagtggctgatctcagccaccgcgaaaatgacatcaaaaacgccattaacctgatgttctggggaatataaatgtcaggcatgagattatcaaaaaggatcttcacctagatccttttcacgtagaaagccagtccgcagaaacggtgctgaccccggatgaatgtcagctactgggctatctggacaagggaaaacgcaagcgcaaagagaaagcaggtagcttgcagtgggcttacatggcgatagctagactgggcggttttatggacagcaagcgaaccggaattgccagctggggcgccctctggtaaggttgggaagccctgcaaagtaaactggatggctttctcgccgccaaggatctgatggcgcaggggatcaagctctgatcaagagacaggatgaggatcgtttcgcatgattgaacaagatggattgcacgcaggttctccggccgcttgggtggagaggctattcggctatgactgggcacaacagacaatcggctgctctgatgccgccgtgttccggctgtcagcgcaggggcgcccggttctttttgtcaagaccgacctgtccggtgccctgaatgaactgcaagacgaggcagcgcggctatcgtggctggccacgacgggcgttccttgcgcagctgtgctcgacgttgtcactgaagcgggaagggactggctgctattgggcgaagtgccggggcaggatctcctgtcatctcaccttgctcctgccgagaaagtatccatcatggctgatgcaatgcggcggctgcatacgcttgatccggctacctgcccattcgaccaccaagcgaaacatcgcatcgagcgagcacgtactcggatggaagccggtcttgtcgatcaggatgatctggacgaagagcatcaggggctcgcgccagccgaactgttcgccaggctcaaggcgagcatgcccgacggcgaggatctcgtcgtgacccatggcgatgcctgcttgccgaatatcatggtggaaaatggccgcttttctggattcatcgactgtggccggctgggtgtggcggaccgctatcaggacatagcgttggctacccgtgatattgctgaagagcttggcggcgaatgggctgaccgcttcctcgtgctttacggtatcgccgctcccgattcgcagcgcatcgccttctatcgccttcttgacgagttcttctgaattattaacgcttacaatttcctgatgcggtattttctccttacgcatctgtgcggtatttcacaccgcatacaggtggcacttttcggggaaatgtgcgcggaacccctatttgtttatttttctaaatacattcaaatatgtatccgctcatgagacaataaccctgataaatgcttcaataatagcacgtgaggagggccaccatggccaagttgaccagtgccgttccggtgctcaccgcgcgcgacgtcgccggagcggtcgagttctggaccgaccggctcgggttctcccgggacttcgtggaggacgacttcgccggtgtggtccgggacgacgtgaccctgttcatcagcgcggtccaggaccaggtggtgccggacaacaccctggcctgggtgtgggtgcgcggcctggacgagctgtacgccgagtggtcggaggtcgtgtccacgaacttccgggacgcctccgggccggccatgaccgagatcggcgagcagccgtgggggcgggagttcgccctgcgcgacccggccggcaactgcgtgcacttcgtggccgaggagcaggactgacacgtgctaaaacttcatttttaatttaaaaggatctaggtgaagatcctttttgataatctcatgaccaaaatcccttaacgtgagttttcgttccactgagcgtcagaccccgtagaaaagatcaaaggatcttcttgagatcctttttttctgcgcgtaatctgctgcttgcaaacaaaaaaaccaccgctaccagcggtggtttgtttgccggatcaagagctaccaactctttttccgaaggtaactggcttcagcagagcgcagataccaaatactgtccttctagtgtagccgtagttaggccaccacttcaagaactctgtagcaccgcctacatacctcgctctgctaatcctgttaccagtggctgctgccagtggcgataagtcgtgtcttaccgggttggactcaagacgatagttaccggataaggcgcagcggtcgggctgaacggggggttcgtgcacacagcccagcttggagcgaacgacctacaccgaactgagatacctacagcgtgagctatgagaaagcgccacgcttcccgaagggagaaaggcggacaggtatccggtaagcggcagggtcggaacaggagagcgcacgagggagcttccagggggaaacgcctggtatctttatagtcctgtcgggtttcgccacctctgacttgagcgtcgatttttgtgatgctcgtcaggggggcggagcctatggaaaaacgccagcaacgcggcctttttacggttcctgggcttttgctggccttttgctcacatgttctttcctgcgttatcccctgattctgtggataaccgtattaccgcctttgagtgagctgataccgctcgccgcagccgaacgaccgagcgcagcgagtcagtgagcgaggaagcggaagagcgcccaatacgcaa

SEQ ID NO: 289 - DNA, 500 bp, Moniliella pollinis
  source 1..500: mol_type = other DNA
tatcagatctcagatctcagagagatgtcagagcagacctcgcccttacaaagacacttgtacaaaagttttcaggcatacggattccttcccttcctcgcagaaactctctatcgcccctttgcacttgccgccgtttggtattggacaattgattgctagcaccccttgcaatgatgttatacaaatttatctactgaattgcttgagagtcagtaacaccacggcttccgcgcgagattccatcaccaggcggtggtcacacagatgagttcatcaacgggattctgtcaagtatctcgcatcaacaaatttagctaacaagtctgaacacgttctattcaaattcagaagccacaagaagataactttagtaggaaaagtagattgcaagcacactccgaggcttgctctcgggcgaagaagggatattttgggctcagagcgccatcagaacgacggacgctccaacaaaggggaagcaacagtggtgaacacca

SEQ ID NO: 290 - DNA, 3881 bp, synthetic construct
  source 1..3881: mol_type = other DNA
gcctcctgctcgatacgtcgatacgtcgatgctggatgagtacatgggtacatgggtacatgggtactggatggtcgatggtcttctgtctggctcggcactgcctgactgggcaacgacgacgacgacgacgacgacgacgacgaccactggagccgtgctgcgatcgtcctaatgatcggggtggcaaggcacaccgtgcctgtgcctgacccacctgtgcacgacgtcatgggtcgcctgcctactagggtgtccgtcgcaggtcgcttagatgggaagcgggacgtgggacccctcgaccctcgattagctgcgcggccaccggccaccggccacttgcgtcaatgcgtcaatgcgtcaatgcgtcaacacggacctggtgcgttgacgcgctgacgtctaggcgcccaccggccaccacccaccagtacgcaatccagacccaggcagctccaagcttggggggttgggcagtacgccgtacggcgcggtcacagatctgagatctgcgacgctggcacggtgtccgcatcgcacgcgtcctaacacactgactgtatactgtatcctgtacccagcacccgatatccaatgcccagtactcagtgtacccaatgtactcactcagtgtacttactccgtactggctgcctgcggcctggcagacgggcgcctcagctcaaaccagcgcgatgcccagcccaacccattccattccatcccagtccagtctccagtccagtcgagccctgccctgccctgccctgccctgccctgcccggcacaccccaatcatctagcttagcgcccgcccacatatgccaacccccgagcgaggctcaatgttcgattctcgatgcgtgacgatgcttcgttacgctcggtcctccgcagccaggggttatataagtacgctcggtccgcttggtccgacatggtttgctcctaccaccatccgatccgtctactagctaccatcgtattctacccttctactgcactactgacagtcaaacaccttataacttcgtataatgtatgctatacgaagttatcctgcaggagctcagaccttgcatgttagccttgaccttgcctctatgaccactaattcgcacaagattgcacgttaccattgtcatcttgccatgtatccaatgtttcctgtttgccatagtacgtagtagatacatcgatcatcgatgcagatgacgcagatggcattggttcgctttgccctatgcatccatcatgcatcatgcatcatgcatcatgcgtcactatccatattaatcattgccctctgtactaggccatgacacctgcagacccttccccagggatgcttcttgtaatagccaatatactacacaactttaccgattacgatcgagatcgatctcactatagtttgtcgaacttcgatgcacatcgagggtgcggaaaaaagctgacggaagcggaagtgggtgaattggttaatttagttagattggcagggttgttcccaagattcaacgcaagctgagaaagaaaacagaaacacgaggcataaggccagtcagaaaatgcattacgaggggagttgaagtgactgtgggccagtgcctgggtcgtcatgtgcaaattttttcttcggttagactgccgcagcatgcagcaactctgccggccctatataactagtgcttcatcttcttgtcattcttgtctctttaccaacacaccggtactctttcaccatgggaacgactttagatgataccgcctaccgttataggacatcagtaccgggcgatgcagaagcaattgaagcccttgatggatcattcaccacagacacagtttttcgcgtgacagctactggtgacggatttactctccgtgaagtgcctgtagatccgccattgacgaaagtatttccagatgatgagagtgatgacgagagcgatgatggcgaagatggtgatcctgactcgcgcactttcgtcgcatacggtgatgatggtgacctggccggatttgttgttgtgtcctactcggggtggaaccgtagattgaccgtcgaagatatcgaagtcgcgccagaacatcgtggtcatggcgtgggacgagcactgatgggtctagctacggaattcgctcgagagcgtggggcgggtcacttatggcttgaagttaccaatgtaaatgctcctgctattcacgcttatcgccgaatgggtttcaccttgtgtggcctcgacacggcattgtatgacggtactgcttctgacggggagcaagcgctatacatgtctatgccctgcccctaatggtgttcaccactgttgcttcccctttgttggagcgtccgtcgttctgatggcgctctgagcccaaaatatcccttcttcgcccgagagcaagcctcggagtgtgcttgcaatctacttttcctactaaagttatcttcttgtggcttctgaatttgaatagaacgtgttcagacttgttagctaaatttgttgatgcgagatacttgacagaatcccgttgatgaactcatctgtgtgaccaccgcctggtgatggaatctcgcgcggaagccgtggtgttactgactctcaagcaattcagtagataaatttgtataacatcattgcaaggggtgctagcaatcaattgtccaataccaaacggcggcaagtgcaaaggggcgatagagagtttctgcgaggaagggaaggaatccgtatgcctgaaaacttttgtacaagtgtctttgtaagggcgaggtctgctctgacatctctctgagatctgagatctgatacctgcaggataacttcgtataatgtatgctatacgaagttataactttgagttcagtttgggaactatttaaacctgctttaaatgaggaaaaaggaattcatcctatgttcttctattccataccgttccactcaaaacttgaacaaggttgttgttccaagttgtttttttaccgaattctcctctccctctaccttttgatgtcttttctgatcaactagtaccactttctcggtttcttcctcttggttgcacaaccactctctgtgtaccgactttgaaaagacttgtatcattgcatgcgcttgaaggctatcaattatcattcatagtgggtttatagttttgtccctgccatccacaatgtaccatagaccatcgctgccatggctgcgcgttgcgcgctgccacccagaccacctttttccagtccgatacaaaatcatgttagtcaattgagcacgggccacccaagggtgacggtcacccctaaggctccgggagtagtaaggcactataccagtttcttttacctccatgcaatttcaaccatggtgcatcgcatctagaatctaggattctaggaatctaggaatctaggaatctaggatctggttaaccccaaaccatattaagacaggctcaatgggcagttagggttagcgtgcaaggagcgccgaggaaccggtcaggagatggggagagcaagctgcaaggtgagatgcccgaaatttgaaatttgaaatgtaaaaccccccgattggctatcgggctcggcgctggaagctggaattggttaggcacgacataagtctttaggcactaggctaggtaggcactagccgtcctcctatcctcgttgctgggcgctggaagctggaggcttcagaaattagtacgatagatactgactcagtactgtgcgcacccatgcgctcccagatcccagatcccagctggtagcagcttgggagcttgggagcttggcatgttggcaagccacatcatgcatccatcatgcaatcatatcttttcaccttgacaacttacattggttgtac

SEQ ID NO: 291 - DNA, 8404 bp, synthetic construct
  source 1..8404: mol_type = other DNA
accgcctctccccgcgcgttggccgattcattaatgcagctggcacgacaggtttcccgactggaaagcgggcagtgagcgcaacgcaattaatgtgagttagctcactcattaggcaccccaggctttacactttatgcttccggctcgtatgttgtgtggaattgtgagcggataacaatttcacacaggaaacagctatgaccatgattacgccaagctatttaggtgacactatagaatactcaagctatgcatcaagcttggtaccgagctcggatccactagtcctgcaggtatcagatctcagatctcagagagatgtcagagcagacctcgcccttacaaagacacttgtacaaaagttttcaggcatacggattccttcccttcctcgcagaaactctctatcgcccctttgcacttgccgccgtttggtattggacaattgattgctagcaccccttgcaatgatgttatacaaatttatctactgaattgcttgagagtcagtaacaccacggcttccgcgcgagattccatcaccaggcggtggtcacacagatgagttcatcaacgggattctgtcaagtatctcgcatcaacaaatttagctaacaagtctgaacacgttctattcaaattcagaagccacaagaagataactttagtaggaaaagtagattgcaagcacactccgaggcttgctctcgggcgaagaagggatattttgggctcagagcgccatcagaacgacggacgctccaacaaaggggaagcaacagtggtgaacaccattagaaaaattcatccagcatcaaatggaactggagcttgttcatgtctgggttatcgatcccatatttctggaacagacgcttctggaggctaggggagaactcgcccagacaattccagaggatcgcaagatcttggtagcgatcggcgatgccaacccggccgacgtcaatgcagccaatgagcttgccctcgtcaaagatgaggttgtcaagcgagaaatcaccatgcgtcacgacagagtctggggaaaagggcaggagcttatgcatctctttccacacttgttccaccggccagccgttgcgctcgtcatcgaaatcactagcgtcgactagaccattgttcatgcgtgattgtgcctgggcaagcctaaaaacacggtcgctgttgaaagggcagttgcagaccggaatagagtgaaggcggcgcaaaaacacagccaaggcatccacgatgttctcgcccgagtcagggtattcctcgaggacctgaaaagcggtcttaccggggatggccgtagtcaacagccacgcatcgtcaggtgtacggatgaagtgcttgatggtggggagtggcatgaactcagttagccaattcagacggaccatttcgtcggttacgtcgtttgcaacgctacccttgccgtgtttaagaaagagctcgggggcgtccggttttccatagagtctgtagatcgtcgcacccgactgtccgacattatctcgagcccatttgtatccgtacaggtctgcgtccatgttggagttgagtcggggtcgcgatacgtgtgtcttttccttacccatggtgaaagagtaccggtgtgttggtaaagagacaagaatgacaagaagatgaagcactagttatatagggccggcagagttgctgcatgctgcggcagtctaaccgaagaaaaaatttgcacatgacgacccaggcactggcccacagtcacttcaactcccctcgtaatgcattttctgactggccttatgcctcgtgtttctgttttctttctcagcttgcgttgaatcttgggaacaaccctgccaatctaactaaattaaccaattcacccacttccgcttccgtcagcttttttccgcaccctcgatgtgcatcgaagttcgacaaactatagtgagatcgatctcgatcgtaatcggtaaagttgtgtagtatattggctattacaagaagcatccctggggaagggtctgcaggtgtcatggcctagtacagagggcaatgattaatatggatagtgacgcatgatgcatgatgcatgatgcatgatggatgcatagggcaaagcgaaccaatgccatctgcgtcatctgcatcgatgatcgatgtatctactacgtactatggcaaacaggaaacattggatacatggcaagatgacaatggtaacgtgcaatcttgtgcgaattagtggtcatagaggcaaggtcaaggctaacatgcaaggtctgagctcctgcaggactagtaacggccgccagtgtggcgcgccattgtcattcgtgattctagtactgtgggtggctgcgaaactccttcactcaatgaattacaatcatgattcgtgattcgcaccgatcccaccagcctctcgagaaaagcggacttgaacattcatgattcacgaccctgtgattcatgaatgccatccgatccagaacggacttgctactcacgactcagactgaatttttaaatgccctcatgatttgattcatgatcagcaatgccctcatgatttgattcatgattcgctgatcacagcggtgaagaacgtaacccattcacgattcagaaggcaagtactgcttcttgctcggctgctttgttgctgccgaggcgggctagcttgcacaaagatcgaggatcggtaatggcgcgccaggcggccgctcgacgacagtgagtatagtcaactatgctatctagtagccaaagtaagtctacattccgggctttgcaggggttagctatttcattagacaatacttacaaccttcgaagggcttccccagaattcaattctatattgattcaatatccacccatcggacccgctctccgtaccccctgttcgcttcgccactacaaccatgtcaagacctgagaatcgtagcaaattgccccactacggcccgagtgctgtcggctggttaaagtagaatgacttgggtagccagatcgagacgcctgacattgatacgcagacagcgcagtcagtttcaaactgacaactgacgcgtactggattgacaggactccttggccggtgccattcgaatcgcttgtagacctcttgccagcatcttgccagagaagcttgaaggctggatcgctcagcctgagctcacacttagtagctccactagtcactcaggtgctcagcctctcctcagcgcctcaagctcaagcctcagggcctcagctgcatcgagctctggtgccagtgccagtgccagtgccagtgccagtgccagtgccagtgccagtgaagagagtggtatgagccaagctatacccaaaagcaaatgatggttattgccagcttccatgcacccctggggcgaaggacaacgaacaacagacagagtttgaattattcactggcctagtactaccaatttaaatttggtggttcagcgcaggaacggcgcgagtgagcgtaagggcaaactccgcatggggcgtgacgtcagtgtccctctggctgaggcactccagcaggctctggtcaacgcatcaacgtgtgtgtgtgtctaccaagcacattgtgcgctcgctgtccgtgcgccgaaatcgcaccagtcagaacgtctataaaacccctcttgcttggagggttaccgggccgtcttttcccaacgctccggctcactcactactctacacaacaatgtccaacttgctcaccgtccaccagaacctcccggccctgccagtggacgcgaccagcgatgaagttcgaaaaaatcttatggatatgttccgcgatcgacaagccttttccgaacatacctggaagatgctgttgagcgtgtgccgatcgtgggccgcttggtgcaaactgaacaaccgcaagtggtttcccgccgagccggaagatgttcgtgattacctgctctacctgcaagcacgtggtttggcggtgaagactatccaacagcacctgggtcaacttaatatgcttcaccgccgatctggactcccacgtccctctgactccaacgctgtgtcccttgttatgcgtcgtattcgcaaagaaaacgtggacgctggcgaacgagcgaaacaggctttggcatttgaacgaactgacttcgatcaggtccgctccttgatggaaaactctgaccgttgccaagacatccgtaacctcgcgttcctgggaatcgcctacaataccctcctccgtatcgctgaaattgctcgcattcgagtgaaggacatttctcgaacagacggcggccgtatgcttattcatatcggtcgtactaaaacactcgtcagcactgctggagtcgagaaagcgctctctcttggagttactaaattggtggaacgatggatttctgtttctggagttgcggatgatcctaataactacttgttttgtcgtgttcgtaagaacggcgtcgccgcgccctccgccacatcccagctctccacacgtgcactcgagggaatcttcgaggcgactcaccgtctgatttacggcgctaaagacgatagcggtcaacgataccttgcctggtctggtcactccgcacgagtgggcgcagcccgcgacatggcgcgtgcaggagtgtccattccagaaatcatgcaagcgggcggatggacgaacgtcaacatcgtgatgaattatattcgtaacttggactcggaaaccggagcaatggtccgacttctcgaggatggcgattaagttgctccctttgctgttctatgatccaaaagatgcttagtgctccactctctactcccgactaccttttacgcattctgacatgactagtagtgcaatgttacccctggtgttttctcgcaatcactttctgtctgctatagcttttgatcgtcagtagttttttggtatagctaaagtagacttttgtacctggcgttcaatgtaattttactccttttttgtgcgatgcaacagatggtgtaaagatcgtcgttaaagttttggcttgatgcttgattcggtgacggttgcttgggtgatccttatatcgtctcctggtgttctcataagcccaggctcttcttagctatgtacaacaggtccaccactgactatgttatgtagaggcatgcatttaacttacggaaagatttaatggagaagaacgtacctagtcagatgcttgacatgaaaacgtattcctgcaattcacaaatcagtatcctgcctgtccactctctagagggcccaattcgccctatagtgagtcgtattacaattcactggccgtcgttttacaacgtcgtgactgggaaaaccctggcgttacccaacttaatcgccttgcagcacatccccctttcgccagctggcgtaatagcgaagaggcccgcaccgatcgcccttcccaacagttgcgcagcctatacgtacggcagtttaaggtttacacctataaaagagagagccgttatcgtctgtttgtggatgtacagagtgatattattgacacgccggggcgacggatggtgatccccctggccagtgcacgtctgctgtcagataaagtctcccgtgaactttacccggtggtgcatatcggggatgaaagctggcgcatgatgaccaccgatatggccagtgtgccggtctccgttatcggggaagaagtggctgatctcagccaccgcgaaaatgacatcaaaaacgccattaacctgatgttctggggaatataaatgtcaggcatgagattatcaaaaaggatcttcacctagatccttttcacgtagaaagccagtccgcagaaacggtgctgaccccggatgaatgtcagctactgggctatctggacaagggaaaacgcaagcgcaaagagaaagcaggtagcttgcagtgggcttacatggcgatagctagactgggcggttttatggacagcaagcgaaccggaattgccagctggggcgccctctggtaaggttgggaagccctgcaaagtaaactggatggctttctcgccgccaaggatctgatggcgcaggggatcaagctctgatcaagagacaggatgaggatcgtttcgcatgattgaacaagatggattgcacgcaggttctccggccgcttgggtggagaggctattcggctatgactgggcacaacagacaatcggctgctctgatgccgccgtgttccggctgtcagcgcaggggcgcccggttctttttgtcaagaccgacctgtccggtgccctgaatgaactgcaagacgaggcagcgcggctatcgtggctggccacgacgggcgttccttgcgcagctgtgctcgacgttgtcactgaagcgggaagggactggctgctattgggcgaagtgccggggcaggatctcctgtcatctcaccttgctcctgccgagaaagtatccatcatggctgatgcaatgcggcggctgcatacgcttgatccggctacctgcccattcgaccaccaagcgaaacatcgcatcgagcgagcacgtactcggatggaagccggtcttgtcgatcaggatgatctggacgaagagcatcaggggctcgcgccagccgaactgttcgccaggctcaaggcgagcatgcccgacggcgaggatctcgtcgtgacccatggcgatgcctgcttgccgaatatcatggtggaaaatggccgcttttctggattcatcgactgtggccggctgggtgtggcggaccgctatcaggacatagcgttggctacccgtgatattgctgaagagcttggcggcgaatgggctgaccgcttcctcgtgctttacggtatcgccgctcccgattcgcagcgcatcgccttctatcgccttcttgacgagttcttctgaattattaacgcttacaatttcctgatgcggtattttctccttacgcatctgtgcggtatttcacaccgcatacaggtggcacttttcggggaaatgtgcgcggaacccctatttgtttatttttctaaatacattcaaatatgtatccgctcatgagacaataaccctgataaatgcttcaataatagcacgtgaggagggccaccatggccaagttgaccagtgccgttccggtgctcaccgcgcgcgacgtcgccggagcggtcgagttctggaccgaccggctcgggttctcccgggacttcgtggaggacgacttcgccggtgtggtccgggacgacgtgaccctgttcatcagcgcggtccaggaccaggtggtgccggacaacaccctggcctgggtgtgggtgcgcggcctggacgagctgtacgccgagtggtcggaggtcgtgtccacgaacttccgggacgcctccgggccggccatgaccgagatcggcgagcagccgtgggggcgggagttcgccctgcgcgacccggccggcaactgcgtgcacttcgtggccgaggagcaggactgacacgtgctaaaacttcatttttaatttaaaaggatctaggtgaagatcctttttgataatctcatgaccaaaatcccttaacgtgagttttcgttccactgagcgtcagaccccgtagaaaagatcaaaggatcttcttgagatcctttttttctgcgcgtaatctgctgcttgcaaacaaaaaaaccaccgctaccagcggtggtttgtttgccggatcaagagctaccaactctttttccgaaggtaactggcttcagcagagcgcagataccaaatactgtccttctagtgtagccgtagttaggccaccacttcaagaactctgtagcaccgcctacatacctcgctctgctaatcctgttaccagtggctgctgccagtggcgataagtcgtgtcttaccgggttggactcaagacgatagttaccggataaggcgcagcggtcgggctgaacggggggttcgtgcacacagcccagcttggagcgaacgacctacaccgaactgagatacctacagcgtgagctatgagaaagcgccacgcttcccgaagggagaaaggcggacaggtatccggtaagcggcagggtcggaacaggagagcgcacgagggagcttccagggggaaacgcctggtatctttatagtcctgtcgggtttcgccacctctgacttgagcgtcgatttttgtgatgctcgtcaggggggcggagcctatggaaaaacgccagcaacgcggcctttttacggttcctgggcttttgctggccttttgctcacatgttctttcctgcgttatcccctgattctgtggataaccgtattaccgcctttgagtgagctgataccgctcgccgcagccgaacgaccgagcgcagcgagtcagtgagcgaggaagcggaagagcgcccaatacgcaa

SEQ ID NO: 292 - DNA, 6592 bp, synthetic construct
  source 1..6592: mol_type = other DNA
tggcatgtaggcctgtaggggctatgcctatatgctcatgcactcatgtcgcgatgttgcgatatcgcgatggaccaaccaagcaagcgtgcagcgtgggcgcttgggccaagggtgctaagctaagtgtaagcactgaagtgctgaagtgctgaagtgctgaacgtggaacgtcaggatgacacatcctctcccttcggcttcgtccaagaaaggttggtcagccatctgagatctgagatctgaaatgaatataatgatgaattgagtcgatgagatctgactatcttgggagattgcaccaatgcgccacggtgaccagatggtcttggtcttagctggtatagtggcacctgatctgccttgacagatctcatgttcatacgttcatgcattcaatcttatcgtctagccgtctgcgatctgcccaactagacgacgacaaatgtaattgatccttgtaaccctgttgctggtcgcagcagcgcgatacgatgccgtcacagtatcggcatctctgtctttagctacgatggtgtgcgtgtaactgatcagtacacccgctgtatcaaaactctatcttcaatccgctaagaatcgtcaccatcagtacatcagtacatcagtgggctaagatctaatggtgtcgttcgacggccgcgggcactagccacgagccaagagcggtacagttgctgcgaaatggtgggcagcctgacaggttcagtttgaataggatgaaaacgccatgaagaacagagaagctggcaattgacgatagtggggcgagcgcacgctgcttgctggtccgagcgtaggacgaacgacaaaccatgggcggggccaccaggccccagggagggcgtcactggttggatgtcgtctgttaggctagagctcaggcgctcagggcctctggcccaagcctcggacgcaagcctctgacgagcgagcgcgcgctggggcgggtctgcgcaggaacggcaggactgccgagttggttgaatattgaatggttggatgattggtttgctgggtttggttttgacacgcacggcacaggacaagtgagtttggaggttggatttgcgcaggtagaaagggcgctcggcctcagggcctcagcgtcagcagacgagctcgccagtccaggtcagtacccagtgttcgttacttcccaccgtccagagtttgctgctgcctctcagcttgattcgtgtcggagaagtagaaatggtcacagcgtaccacacactgtccccatgcctgcgtcctgctccacgagtgtttagccacaaaaatttatggacaaccttactgagcctgtgctggggggtgctttagcaccagcactggcgccatggcgtcaaggttaattccactgtcattcgacaaccttcaactgatgggggcaactgggcacaaaaccttggatatataaccaactccaactcccacggttttttaccttttgctcttctccccaggactcactacttctactcctctattcatcttcaccaaaatggttaccgagatcgaagtggatgcggtgctgttcgacatggacggcaccctgattgactctacccctgctgtcaaccagacttgggccgagtacatcgaacgatacaacctcgactttgactacgtcatgtctcattgtcacggatgtcgaacggtagagagcctcaagaatatcgttggattgccggatgaccagttggaacaaggcgtagtcgagtttgaagggcgtattagtgaactggctgaagaggcggcacgtaccaatggtcctggtcaaattgtggctttgcccggcgcaaaagaactgcttgcccaactgaacaagggtagcgaacaacctggtcgtcgtcctggatgggccatcgttacttcggcaaccaaggcttacgcttacgtgggcttcagagcgtcgggcgtgaatggtacagaattccctcgtgcttttgtcacgggtgacaatgtcagcaagggcaaacctgatcctgaaccatacctcttgggagcaaagacgttacaacctcctgctgatcctaaacgttgtctcgtaatcgaagatgctcctccaggtattcgatcaggtgttgctgcaggtgccaaaacccttggattgaccactacccacgcggaaaacctcatgtggcaagcgggtgctaactgggtcgtaccagacttatcgagtgtttcggcacgttgggaaggtgaaggtgcggacgctcgtctttttattcgcattgaaaactcaggccagcgtccagagtaacatggtctgagccgcccacgattccttccttcatgagcgtatgacgacccttttacttagcatgtgcctctaaagaatacgttttgcatacccacatattcgtaaccctgtcctctatagcttctacaggtcatagtcactggctgccagtataaacgtgtcaatatctaatcctcataagatgcctcgctctgtcgtccacaataaaattcagtaacgcaaggactgcgcgactgagtgattgccgatgatatgagaaaactaatttcaagccatttgaacttcaataaatgcttccgctaacatcacggatcatcgatcatcaaccagcctccattaataggcctgccaccactcgcgcaatcatgaatctgatcatacctggctagcgattctcataacaccagaattacctgcccattaaagaaaccctattctgcctgtaacccggcaccagccggtccgaattcacgacagactaaggctctcgcgcagcttgaagactgagtccgtctcatacccacagtatcggcatctctgtctcgacgacagtgagtatagtcaactatgctatctagtagccaaagtaagtctacattccgggctttgcaggggttagctatttcattagacaatacttacaaccttcgaagggcttccccagaattcaattctatattgattcaatatccacccatcggacccgctctccgtaccccctgttcgcttcgccactacaaccatgtcaagacctgagaatcgtagcaaattgccccactacggcccgagtgctgtcggctggttaaagtagaatgacttgggtagccagatcgagacgcctgacattgatacgcagacagcgcagtcagtttcaaactgacaactgacgcgtactggattgacaggactccttggccggtgccattcgaatcgcttgtagacctcttgccagcatcttgccagagaagcttgaaggctggatcgctcagcctgagctcacacttagtagctccactagtcactcaggtgctcagcctctcctcagcgcctcaagctcaagcctcagggcctcagctgcatcgagctctggtgccagtgccagtgccagtgccagtgccagtgccagtgccagtgccagtgaagagagtggtatgagccaagctatacccaaaagcaaatgatggttattgccagcttccatgcacccctggggcgaaggacaacgaacaacagacagagtttgaattattcactggcctagtactaccaatttaaatttggtggttcagcgcaggaacggcgcgagtgagcgtaagggcaaactccgcatggggcgtgacgtcagtgtccctctggctgaggcactccagcaggctctggtcaacgcatcaacgtgtgtgtgtgtctaccaagcacattgtgcgctcgctgtccgtgcgccgaaatcgcaccagtcagaacgtctataaaacccctcttgcttggagggttaccgggccgtcttttcccaacgctccggctcactcactactctacacaacaaatggttaccgagatcgaagtggatgcggtgctgttcgacatggacggcaccctgattgactctacccctgctgtcaaccagacttgggccgagtacatcgaacgatacaacctcgactttgactacgtcatgtctcattgtcacggatgtcgaacggtagagagcctcaagaatatcgttggattgccggatgaccagttggaacaaggcgtagtcgagtttgaagggcgtattagtgaactggctgaagaggcggcacgtaccaatggtcctggtcaaattgtggctttgcccggcgcaaaagaactgcttgcccaactgaacaagggtagcgaacaacctggtcgtcgtcctggatgggccatcgttacttcggcaaccaaggcttacgcttacgtgggcttcagagcgtcgggcgtgaatggtacagaattccctcgtgcttttgtcacgggtgacaatgtcagcaagggcaaacctgatcctgaaccatacctcttgggagcaaagacgttacaacctcctgctgatcctaaacgttgtctcgtaatcgaagatgctcctccaggtattcgatcaggtgttgctgcaggtgccaaaacccttggattgaccactacccacgcggaaaacctcatgtggcaagcgggtgctaactgggtcgtaccagacttatcgagtgtttcggcacgttgggaaggtgaaggtgcggacgctcgtctttttattcgcattgaaaactcaggccagcgtccagagtaacacgaagggtttcccatctgtgtgacctgatccctttttacgtttttttgttttgttttttcttttgttcatgatcaacttgggagtgattcctcttggtgatgtcgaaaattgaactgttataccaatattctgttgcctttgtttcctgtttgtagtttactactttttacagtagtcgttgttcctgccttgcttgcgtttgtcagggtttccctttagcttagtaccaatatctagccttaattttgcttattctttctcaccgcccatgattgatttcaatcatgattaatgatttatgcatgaaaactcaaaatactcaattgtcttgtacaaggcaatcacaagctggtcagccattctcagcgcctataagagctttcagccaggccggccccaaaacgatctaccctgtggacctggctaggctaaactttggaaagtcatgcaattatgaacgtttgaagctcaagcgctcctaccctctcctggagcagtgcttgaagactgagtccgtctcagataacttcgtataatgtatgctatacgaagttatcctgcaggagctcagaccttgcatgttagccttgaccttgcctctatgaccactaattcgcacaagattgcacgttaccattgtcatcttgccatgtatccaatgtttcctgtttgccatagtacgtagtagatacatcgatcatcgatgcagatgacgcagatggcattggttcgctttgccctatgcatgcatcatgcatcatgcatcatgcgtcatgcgtcactatccatattaatcattgccctctgtactaggccatgacacctgcagacccttccccagggatgcttcttgtaatagccaatatactacacaactttaccgattacgatcgagatcgatctcactatagtttgtcgaacttcgatgcacatcgagggtgcggaaaaaagctgacggaagcggaagtgggtgaattggttaatttagttagattggcagggttgttcccaagattcaacgcaagctgagaaagaaaacagaaacacgaggcataaggccagtcagaaaatgcattacgaggggagttgaagtgactgtgggccagtgcctgggtcgtcatgtgcaaattttttcttcggttagactgccgcagcatgcagcaactctgccggccctatataactagtgcttcatcttcttgtcattcttgtctctttaccaacacaccggtactctttcaccatgggtaaggaaaagacacacgtatcgcgaccccgactcaactccaacatggacgcagacctgtacggatacaaatgggctcgagataatgtcggacagtcgggtgcgacgatctacagactctatggaaaaccggacgcccccgagctctttcttaaacacggcaagggtagcgttgcaaacgacgtaaccgacgaaatggtccgtctgaattggctaactgagttcatgccactccccaccatcaagcacttcatccgtacacctgacgatgcgtggctgttgactacggccatccccggtaagaccgcttttcaggtcctcgaggaataccctgactcgggcgagaacatcgtggatgccttggctgtgtttttgcgccgccttcactctattccggtctgcaactgccctttcaacagcgaccgtgtttttaggcttgcccaggcacaatcacgcatgaacaatggtctagtcgacgctagtgatttcgatgacgagcgcaacggctggccggtggaacaagtgtggaaagagatgcataagctcctgcccttttccccagactctgtcgtgacgcatggtgatttctcgcttgacaacctcatctttgacgagggcaagctcattggctgcattgacgtcggccgggttggcatcgccgatcgctaccaagatcttgcgatcctctggaattgtctgggcgagttctcccctagcctccagaagcgtctgttccagaaatatgggatcg

SEQ ID NO: 293 - DNA, 7969 bp, synthetic construct
  source 1..7969: mol_type = other DNA
accgcctctccccgcgcgttggccgattcattaatgcagctggcacgacaggtttcccgactggaaagcgggcagtgagcgcaacgcaattaatgtgagttagctcactcattaggcaccccaggctttacactttatgcttccggctcgtatgttgtgtggaattgtgagcggataacaatttcacacaggaaacagctatgaccatgattacgccaagctatttaggtgacactatagaatactcaagctatgcatcaagcttggtaccgagctcggatccactagtcctgcaggtatcagatctcagatctcagagagatgtcagagcagacctcgcccttacaaagacacttgtacaaaagttttcaggcatacggattccttcccttcctcgcagaaactctctatcgcccctttgcacttgccgccgtttggtattggacaattgattgctagcaccccttgcaatgatgttatacaaatttatctactgaattgcttgagagtcagtaacaccacggcttccgcgcgagattccatcaccaggcggtggtcacacagatgagttcatcaacgggattctgtcaagtatctcgcatcaacaaatttagctaacaagtctgaacacgttctattcaaattcagaagccacaagaagataactttagtaggaaaagtagattgcaagcacactccgaggcttgctctcgggcgaagaagggatattttgggctcagagcgccatcagaacgacggacgctccaacaaaggggaagcaacagtggtgaacaccattaatcctgttcctcagctacgaaatgaacacaatttccagctggatctcggagtgcgaactcacgcccccagggttgttcaccaatctcagtcatagcaggacctgaagcgtcacgaaagttagtggatacaacttcagaccattccgcgtacaattcatctaatccgcgtacccagacccatgcaagtgtattgtcagggacaacttgatcttgaacggccgagataaacagggtcacatcatcacgcacgacgcctgcaaagtcatcttcaacgaagtctcgactgaaacccaacctatccgtccaaaactctacagcgccggctacatctctcgcggttagcaccggcacggcgctcgtcaactttgccatggtgaaagagtaccggtgtgttggtaaagagacaagaatgacaagaagatgaagcactagttatatagggccggcagagttgctgcatgctgcggcagtctaaccgaagaaaaaatttgcacatgacgacccaggcactggcccacagtcacttcaactcccctcgtaatgcattttctgactggccttatgcctcgtgtttctgttttctttctcagcttgcgttgaatcttgggaacaaccctgccaatctaactaaattaaccaattcacccacttccgcttccgtcagcttttttccgcaccctcgatgtgcatcgaagttcgacaaactatagtgagatcgatctcgatcgtaatcggtaaagttgtgtagtatattggctattacaagaagcatccctggggaagggtctgcaggtgtcatggcctagtacagagggcaatgattaatatggatagtgacgcatgatgcatgatgcatgatgcatgatggatgcatagggcaaagcgaaccaatgccatctgcgtcatctgcatcgatgatcgatgtatctactacgtactatggcaaacaggaaacattggatacatggcaagatgacaatggtaacgtgcaatcttgtgcgaattagtggtcatagaggcaaggtcaaggctaacatgcaaggtctgagctcctgcaggactagtaacggccgccagtgtggcgcgccattgtcattcgtgattctagtactgtgggtggctgcgaaactccttcactcaatgaattacaatcatgattcgtgattcgcaccgatcccaccagcctctcgagaaaagcggacttgaacattcatgattcacgaccctgtgattcatgaatgccatccgatccagaacggacttgctactcacgactcagactgaatttttaaatgccctcatgatttgattcatgatcagcaatgccctcatgatttgattcatgattcgctgatcacagcggtgaagaacgtaacccattcacgattcagaaggcaagtactgcttcttgctcggctgctttgttgctgccgaggcgggctagcttgcacaaagatcgaggatcggtaatggcgcgccaggcggccgctcgacgacagtgagtatagtcaactatgctatctagtagccaaagtaagtctacattccgggctttgcaggggttagctatttcattagacaatacttacaaccttcgaagggcttccccagaattcaattctatattgattcaatatccacccatcggacccgctctccgtaccccctgttcgcttcgccactacaaccatgtcaagacctgagaatcgtagcaaattgccccactacggcccgagtgctgtcggctggttaaagtagaatgacttgggtagccagatcgagacgcctgacattgatacgcagacagcgcagtcagtttcaaactgacaactgacgcgtactggattgacaggactccttggccggtgccattcgaatcgcttgtagacctcttgccagcatcttgccagagaagcttgaaggctggatcgctcagcctgagctcacacttagtagctccactagtcactcaggtgctcagcctctcctcagcgcctcaagctcaagcctcagggcctcagctgcatcgagctctggtgccagtgccagtgccagtgccagtgccagtgccagtgccagtgccagtgaagagagtggtatgagccaagctatacccaaaagcaaatgatggttattgccagcttccatgcacccctggggcgaaggacaacgaacaacagacagagtttgaattattcactggcctagtactaccaatttaaatttggtggttcagcgcaggaacggcgcgagtgagcgtaagggcaaactccgcatggggcgtgacgtcagtgtccctctggctgaggcactccagcaggctctggtcaacgcatcaacgtgtgtgtgtgtctaccaagcacattgtgcgctcgctgtccgtgcgccgaaatcgcaccagtcagaacgtctataaaacccctcttgcttggagggttaccgggccgtcttttcccaacgctccggctcactcactactctacacaacaatgtccaacttgctcaccgtccaccagaacctcccggccctgccagtggacgcgaccagcgatgaagttcgaaaaaatcttatggatatgttccgcgatcgacaagccttttccgaacatacctggaagatgctgttgagcgtgtgccgatcgtgggccgcttggtgcaaactgaacaaccgcaagtggtttcccgccgagccggaagatgttcgtgattacctgctctacctgcaagcacgtggtttggcggtgaagactatccaacagcacctgggtcaacttaatatgcttcaccgccgatctggactcccacgtccctctgactccaacgctgtgtcccttgttatgcgtcgtattcgcaaagaaaacgtggacgctggcgaacgagcgaaacaggctttggcatttgaacgaactgacttcgatcaggtccgctccttgatggaaaactctgaccgttgccaagacatccgtaacctcgcgttcctgggaatcgcctacaataccctcctccgtatcgctgaaattgctcgcattcgagtgaaggacatttctcgaacagacggcggccgtatgcttattcatatcggtcgtactaaaacactcgtcagcactgctggagtcgagaaagcgctctctcttggagttactaaattggtggaacgatggatttctgtttctggagttgcggatgatcctaataactacttgttttgtcgtgttcgtaagaacggcgtcgccgcgccctccgccacatcccagctctccacacgtgcactcgagggaatcttcgaggcgactcaccgtctgatttacggcgctaaagacgatagcggtcaacgataccttgcctggtctggtcactccgcacgagtgggcgcagcccgcgacatggcgcgtgcaggagtgtccattccagaaatcatgcaagcgggcggatggacgaacgtcaacatcgtgatgaattatattcgtaacttggactcggaaaccggagcaatggtccgacttctcgaggatggcgattaagttgctccctttgctgttctatgatccaaaagatgcttagtgctccactctctactcccgactaccttttacgcattctgacatgactagtagtgcaatgttacccctggtgttttctcgcaatcactttctgtctgctatagcttttgatcgtcagtagttttttggtatagctaaagtagacttttgtacctggcgttcaatgtaattttactccttttttgtgcgatgcaacagatggtgtaaagatcgtcgttaaagttttggcttgatgcttgattcggtgacggttgcttgggtgatccttatatcgtctcctggtgttctcataagcccaggctcttcttagctatgtacaacaggtccaccactgactatgttatgtagaggcatgcatttaacttacggaaagatttaatggagaagaacgtacctagtcagatgcttgacatgaaaacgtattcctgcaattcacaaatcagtatcctgcctgtccactctctagagggcccaattcgccctatagtgagtcgtattacaattcactggccgtcgttttacaacgtcgtgactgggaaaaccctggcgttacccaacttaatcgccttgcagcacatccccctttcgccagctggcgtaatagcgaagaggcccgcaccgatcgcccttcccaacagttgcgcagcctatacgtacggcagtttaaggtttacacctataaaagagagagccgttatcgtctgtttgtggatgtacagagtgatattattgacacgccggggcgacggatggtgatccccctggccagtgcacgtctgctgtcagataaagtctcccgtgaactttacccggtggtgcatatcggggatgaaagctggcgcatgatgaccaccgatatggccagtgtgccggtctccgttatcggggaagaagtggctgatctcagccaccgcgaaaatgacatcaaaaacgccattaacctgatgttctggggaatataaatgtcaggcatgagattatcaaaaaggatcttcacctagatccttttcacgtagaaagccagtccgcagaaacggtgctgaccccggatgaatgtcagctactgggctatctggacaagggaaaacgcaagcgcaaagagaaagcaggtagcttgcagtgggcttacatggcgatagctagactgggcggttttatggacagcaagcgaaccggaattgccagctggggcgccctctggtaaggttgggaagccctgcaaagtaaactggatggctttctcgccgccaaggatctgatggcgcaggggatcaagctctgatcaagagacaggatgaggatcgtttcgcatgattgaacaagatggattgcacgcaggttctccggccgcttgggtggagaggctattcggctatgactgggcacaacagacaatcggctgctctgatgccgccgtgttccggctgtcagcgcaggggcgcccggttctttttgtcaagaccgacctgtccggtgccctgaatgaactgcaagacgaggcagcgcggctatcgtggctggccacgacgggcgttccttgcgcagctgtgctcgacgttgtcactgaagcgggaagggactggctgctattgggcgaagtgccggggcaggatctcctgtcatctcaccttgctcctgccgagaaagtatccatcatggctgatgcaatgcggcggctgcatacgcttgatccggctacctgcccattcgaccaccaagcgaaacatcgcatcgagcgagcacgtactcggatggaagccggtcttgtcgatcaggatgatctggacgaagagcatcaggggctcgcgccagccgaactgttcgccaggctcaaggcgagcatgcccgacggcgaggatctcgtcgtgacccatggcgatgcctgcttgccgaatatcatggtggaaaatggccgcttttctggattcatcgactgtggccggctgggtgtggcggaccgctatcaggacatagcgttggctacccgtgatattgctgaagagcttggcggcgaatgggctgaccgcttcctcgtgctttacggtatcgccgctcccgattcgcagcgcatcgccttctatcgccttcttgacgagttcttctgaattattaacgcttacaatttcctgatgcggtattttctccttacgcatctgtgcggtatttcacaccgcatacaggtggcacttttcggggaaatgtgcgcggaacccctatttgtttatttttctaaatacattcaaatatgtatccgctcatgagacaataaccctgataaatgcttcaataatagcacgtgaggagggccaccatggccaagttgaccagtgccgttccggtgctcaccgcgcgcgacgtcgccggagcggtcgagttctggaccgaccggctcgggttctcccgggacttcgtggaggacgacttcgccggtgtggtccgggacgacgtgaccctgttcatcagcgcggtccaggaccaggtggtgccggacaacaccctggcctgggtgtgggtgcgcggcctggacgagctgtacgccgagtggtcggaggtcgtgtccacgaacttccgggacgcctccgggccggccatgaccgagatcggcgagcagccgtgggggcgggagttcgccctgcgcgacccggccggcaactgcgtgcacttcgtggccgaggagcaggactgacacgtgctaaaacttcatttttaatttaaaaggatctaggtgaagatcctttttgataatctcatgaccaaaatcccttaacgtgagttttcgttccactgagcgtcagaccccgtagaaaagatcaaaggatcttcttgagatcctttttttctgcgcgtaatctgctgcttgcaaacaaaaaaaccaccgctaccagcggtggtttgtttgccggatcaagagctaccaactctttttccgaaggtaactggcttcagcagagcgcagataccaaatactgtccttctagtgtagccgtagttaggccaccacttcaagaactctgtagcaccgcctacatacctcgctctgctaatcctgttaccagtggctgctgccagtggcgataagtcgtgtcttaccgggttggactcaagacgatagttaccggataaggcgcagcggtcgggctgaacggggggttcgtgcacacagcccagcttggagcgaacgacctacaccgaactgagatacctacagcgtgagctatgagaaagcgccacgcttcccgaagggagaaaggcggacaggtatccggtaagcggcagggtcggaacaggagagcgcacgagggagcttccagggggaaacgcctggtatctttatagtcctgtcgggtttcgccacctctgacttgagcgtcgatttttgtgatgctcgtcaggggggcggagcctatggaaaaacgccagcaacgcggcctttttacggttcctgggcttttgctggccttttgctcacatgttctttcctgcgttatcccctgattctgtggataaccgtattaccgcctttgagtgagctgataccgctcgccgcagccgaacgaccgagcgcagcgagtcagtgagcgaggaagcggaagagcgcccaatacgcaa

SEQ ID NO: 294 - DNA, 4332 bp, synthetic construct
  source 1..4332: mol_type = other DNA
tgcagagccttgcaaatgatgaaagaccaatggaattgatcattgattattgatgatgcatgatgaaagagatagaaacagatgcaagatgggatggcgcgatgatcaaatgataatgaacgttcaacccttcaaaattgaaactctcaggctgagcggctgagcaagctctgagaatgtgggtcttcgaagactttcgcttgagcatggtgcatgtgcaaagagatggaatgtggaattgttgtaggtaggaacacagcccggtagagcggcgcagtggctcagcgaagctgggagaacgactgaaccggtcttgagattcatcatctcagcgtgcgtcagcgcgtcagcttcagcgtttgagaatggcacggactgacctgtcgtacatcccaaggaggcccgtgcgctatactcgccttgtggcctaatctgcgatcaacccatcctcaacgaaagcgcaagtagcgactaagcacactatctttcgggtcggtgcggtcacagtatcggcatctctgtctttagctacgatggtgtgcgtgtaactgatcagtacacccgctgtatcaaaactctatcttcaatccgctaagaatcgtcaccatcagtacatcagtacatcagtgggctaagatctaatggtgtcgttcgacggccgcgggcactagccacgagccaagagcggtacagttgctgcgaaatggtgggcagcctgacaggttcagtttgaataggatgaaaacgccatgaagaacagagaagctggcaattgacgatagtggggcgagcgcacgctgcttgctggtccgagcgtaggacgaacgacaaaccatgggcggggccaccaggccccagggagggcgtcactggttggatgtcgtctgttaggctagagctcaggcgctcagggcctctggcccaagcctcggacgcaagcctctgacgagcgagcgcgcgctggggcgggtctgcgcaggaacggcaggactgccgagttggttgaatattgaatggttggatgattggtttgctgggtttggttttgacacgcacggcacaggacaagtgagtttggaggttggatttgcgcaggtagaaagggcgctcggcctcagggcctcagcgtcagcagacgagctcgccagtccaggtcagtacccagtgttcgttacttcccaccgtccagagtttgctgctgcctctcagcttgattcgtgtcggagaagtagaaatggtcacagcgtaccacacactgtccccatgcctgcgtcctgctccacgagtgtttagccacaaaaatttatggacaaccttactgagcctgtgctggggggtgctttagcaccagcactggcgccatggcgtcaaggttaattccactgtcattcgacaaccttcaactgatgggggcaactgggcacaaaaccttggatatataaccaactccaactcccacggttttttaccttttgctcttctccccaggactcactacttctactcctctattcatcttcaccaaaatgaacattccgaccaagatgaaggcagtcgttaaatcggaggcaggttatgacaatatgtccctgcaagagattcctgtcccagaagttaagggaaaacaggtgttgatgaaagtcgcctatacgggtatctgcggtacggacattcatacctttaaaggcgagtacgccaatgccgtgaccccacttgtcctcggccatgaattttctggcaaggtcgttgccgtcggagatgaagttaccaaggtcaaaccgggtgaccgagttacctccgaaacaacatttgatacatgcggagagtgtgtgtactgtaaaaataaggaatataacctgtgcgaaaaccgttcgggtattggtacgaaagccaatggatcgatggctaattatgtgcttacgcgagaggagtctgtgcatgtccttcctgacaatgtttcctacaaacttgccgcgatgtctgagccgctggcttcctgtgtgcacgcaatgtaccagaaaaccccgttcacccttcatgatacagttctcattatcggccccggacctatgggtttgctctctctgcagattgcaaaggaaattggagcctttaccatcgtctccggtattacgaaagacagcgaccgcctggaaatcgcaaaagaacttggagccgacatcgttgttgacacgcagaaggaagacttggcgaagatcgtcatggaggctactaacggagtgggagttaccaaagtctatgattgtagcggcgctacaccagcggtgaatgctgccctcccccttctgaagaagggaggtacttttcagcaggttggcctgtttgcaaagcctctgaacgaattggatgaacgtacaattattcagcacgaaattacatacgtgggatcccgttctcagaatccgtatgattggcctatcgccattcacctggaggccaaaggtgctattaatgaagataaaatggttacgaaagtcttcgatttggatcattggcgtgaggcattcgaggctatgatggctggaaaagaactcaaggttcttattgccagcaatccagacgacgaaactcttaattaacacggatcaacaaaaatgtgcgccagctttgttgtgtgcccttttcctctagcggatcctatccacatttcgtgaatgaaccgattaagctctgacgagatttccttgttttctgtagatacctcttgtagaggtgtcaaagttatgttgtgatcgagagagttacctgcaaggtattatgcaagcggcttgatgaggacactcaactacgtgtgagtaggagtgcgttgctcagcagttgacgcgtgagccgcttgagcagcttgataaaggtcctaatcgtcttccagctgttggcagacgacaatgtgctgtagtagtaggataggcccgtaaaagtgtagaagcaataggttgagactgactgtaatgggtacttgcgttcaaagactgaaagtccaaaggattgctcaaaggcccctgaggtctgagcctctgagcgcgctcttcgtcaaaattcgccggggccatcggtcatcctctcgagggcagcatcttcctgcttgaagactgagtccgtctcagataacttcgtataatgtatgctatacgaagttatcctgcaggagctcagaccttgcatgttagccttgaccttgcctctatgaccactaattcgcacaagattgcacgttaccattgtcatcttgccatgtatccaatgtttcctgtttgccatagtacgtagtagatacatcgatcatcgatgcagatgacgcagatggcattggttcgctttgccctatgcatgcatcatgcatcatgcatcatgcgtcatgcgtcactatccatattaatcattgccctctgtactaggccatgacacctgcagacccttccccagggatgcttcttgtaatagccaatatactacacaactttaccgattacgatcgagatcgatctcactatagtttgtcgaacttcgatgcacatcgagggtgcggaaaaaagctgacggaagcggaagtgggtgaattggttaatttagttagattggcagggttgttcccaagattcaacgcaagctgagaaagaaaacagaaacacgaggcataaggccagtcagaaaatgcattacgaggggagttgaagtgactgtgggccagtgcctgggtcgtcatgtgcaaattttttcttcggttagactgccgcagcatgcagcaactctgccggccctatataactagtgcttcatcttcttgtcattcttgtctctttaccaacacaccggtactctttcaccatgggaacgactttagatgataccgcctaccgttataggacatcagtaccgggcgatgcagaagcaattgaagcccttgatggatcattcaccacagacacagtttttcgcgtgacagctactggtgacggatttactctccgtgaagtgcctgtagatccgccattgacgaaagtatttccagatgatgagagtgatgacgagagcgatgatggcgaagatggtgatcctgactcgcgcactttcgtcgcatacggtgatgatggtgacctggccggatttgttgttgtgtcctactcggggtggaaccgtagattgaccgtcgaagatatcgaagtcgcgccagaacatcgtggtcatggcgtgggacgagcactgatgggtctagctacggaattcgctcgagagcgtggggcgggtcacttatggcttgaagttaccaatgtaaatgctcctgctattcacgcttatcgccgaatgggtttc

SEQ ID NO: 295 - DNA, 4156 bp, synthetic construct
  source 1..4156: mol_type = other DNA
aagcccttgatggatcattcaccacagacacagtttttcgcgtgacagctactggtgacggatttactctccgtgaagtgcctgtagatccgccattgacgaaagtatttccagatgatgagagtgatgacgagagcgatgatggcgaagatggtgatcctgactcgcgcactttcgtcgcatacggtgatgatggtgacctggccggatttgttgttgtgtcctactcggggtggaaccgtagattgaccgtcgaagatatcgaagtcgcgccagaacatcgtggtcatggcgtgggacgagcactgatgggtctagctacggaattcgctcgagagcgtggggcgggtcacttatggcttgaagttaccaatgtaaatgctcctgctattcacgcttatcgccgaatgggtttcaccttgtgtggcctcgacacggcattgtatgacggtactgcttctgacggggagcaagcgctatacatgtctatgccctgcccctaatggtgttcaccactgttgcttcccctttgttggagcgtccgtcgttctgatggcgctctgagcccaaaatatcccttcttcgcccgagagcaagcctcggagtgtgcttgcaatctacttttcctactaaagttatcttcttgtggcttctgaatttgaatagaacgtgttcagacttgttagctaaatttgttgatgcgagatacttgacagaatcccgttgatgaactcatctgtgtgaccaccgcctggtgatggaatctcgcgcggaagccgtggtgttactgactctcaagcaattcagtagataaatttgtataacatcattgcaaggggtgctagcaatcaattgtccaataccaaacggcggcaagtgcaaaggggcgatagagagtttctgcgaggaagggaaggaatccgtatgcctgaaaacttttgtacaagtgtctttgtaagggcgaggtctgctctgacatctctctgagatctgagatctgatacctgcaggataacttcgtataatgtatgctatacgaagttatgtcacagtatcggcatctctgtctttagctacgatggtgtgcgtgtaactgatcagtacacccgctgtatcaaaactctatcttcaatccgctaagaatcgtcaccatcagtacatcagtacatcagtgggctaagatctaatggtgtcgttcgacggccgcgggcactagccacgagccaagagcggtacagttgctgcgaaatggtgggcagcctgacaggttcagtttgaataggatgaaaacgccatgaagaacagagaagctggcaattgacgatagtggggcgagcgcacgctgcttgctggtccgagcgtaggacgaacgacaaaccatgggcggggccaccaggccccagggagggcgtcactggttggatgtcgtctgttaggctagagctcaggcgctcagggcctctggcccaagcctcggacgcaagcctctgacgagcgagcgcgcgctggggcgggtctgcgcaggaacggcaggactgccgagttggttgaatattgaatggttggatgattggtttgctgggtttggttttgacacgcacggcacaggacaagtgagtttggaggttggatttgcgcaggtagaaagggcgctcggcctcagggcctcagcgtcagcagacgagctcgccagtccaggtcagtacccagtgttcgttacttcccaccgtccagagtttgctgctgcctctcagcttgattcgtgtcggagaagtagaaatggtcacagcgtaccacacactgtccccatgcctgcgtcctgctccacgagtgtttagccacaaaaatttatggacaaccttactgagcctgtgctggggggtgctttagcaccagcactggcgccatggcgtcaaggttaattccactgtcattcgacaaccttcaactgatgggggcaactgggcacaaaaccttggatatataaccaactccaactcccacggttttttaccttttgctcttctccccaggactcactacttctactcctctattcatcttcaccaaaatgaacattccgaccaagatgaaggcagtcgttaaatcggaggcaggttatgacaatatgtccctgcaagagattcctgtcccagaagttaagggaaaacaggtgttgatgaaagtcgcctatacgggtatctgcggtacggacattcatacctttaaaggcgagtacgccaatgccgtgaccccacttgtcctcggccatgaattttctggcaaggtcgttgccgtcggagatgaagttaccaaggtcaaaccgggtgaccgagttacctccgaaacaacatttgatacatgcggagagtgtgtgtactgtaaaaataaggaatataacctgtgcgaaaaccgttcgggtattggtacgaaagccaatggatcgatggctaattatgtgcttacgcgagaggagtctgtgcatgtccttcctgacaatgtttcctacaaacttgccgcgatgtctgagccgctggcttcctgtgtgcacgcaatgtaccagaaaaccccgttcacccttcatgatacagttctcattatcggccccggacctatgggtttgctctctctgcagattgcaaaggaaattggagcctttaccatcgtctccggtattacgaaagacagcgaccgcctggaaatcgcaaaagaacttggagccgacatcgttgttgacacgcagaaggaagacttggcgaagatcgtcatggaggctactaacggagtgggagttaccaaagtctatgattgtagcggcgctacaccagcggtgaatgctgccctcccccttctgaagaagggaggtacttttcagcaggttggcctgtttgcaaagcctctgaacgaattggatgaacgtacaattattcagcacgaaattacatacgtgggatcccgttctcagaatccgtatgattggcctatcgccattcacctggaggccaaaggtgctattaatgaagataaaatggttacgaaagtcttcgatttggatcattggcgtgaggcattcgaggctatgatggctggaaaagaactcaaggttcttattgccagcaatccagacgacgaaactcttaattaacacggatcaacaaaaatgtgcgccagctttgttgtgtgcccttttcctctagcggatcctatccacatttcgtgaatgaaccgattaagctctgacgagatttccttgttttctgtagatacctcttgtagaggtgtcaaagttatgttgtgatcgagagagttacctgcaaggtattatgcaagcggcttgatgaggacactcaactacgtgtgagtaggagtgcgttgctcagcagttgacgcgtgagccgcttgagcagcttgataaaggtcctaatcgtcttccagctgttggcagacgacaatgtgctgtagtagtaggataggcccgtaaaagtgtagaagcaataggttgagactgactgtaatgggtacttgcgttcaaagactgaaagtccaaaggattgctcaaaggcccctgaggtctgagcctctgagcgcgctcttcgtcaaaattcgccggggccatcggtcatcctctcgagggcagcatcttcctgcttgaagactgagtccgtctcagattgttgcatcgtctcatcagatcgtccttcattgtagtgataattggtgcaaccttgtattagactgtatagcagaatccctcgctataaaaagtattatgcatacgcagttccaagcaggaattagtatggtagtgggacttggctgaagggctgacgacatggcgagaaaaacgtatcaattcggaacacactgtgcaatgtcgatcacgttttcggtggttcacggtaggcttcctagtccatgggaaagtggtaacatctatcccttgagcgcttgagcttaatgttaccttgtgcaaaagtcatttgaagcttcacttgaagcttgaagctttgaagttttgaagcttgaagcgcaaacagcagcggtacatgtatactggcgtaacctgcctacagtggtgcatcagtacgtcaagcgggtagcccgaaatctcattaaggtcatttgccctctaagcttagtacctagtgatctgttc

SEQ ID NO: 296 - DNA, 4600 bp, synthetic construct
  source 1..4600: mol_type = other DNA
tgcagagccttgcaaatgatgaaagaccaatggaattgatcattgattattgatgatgcatgatgaaagagatagaaacagatgcaagatgggatggcgcgatgatcaaatgataatgaacgttcaacccttcaaaattgaaactctcaggctgagcggctgagcaagctctgagaatgtgggtcttcgaagactttcgcttgagcatggtgcatgtgcaaagagatggaatgtggaattgttgtaggtaggaacacagcccggtagagcggcgcagtggctcagcgaagctgggagaacgactgaaccggtcttgagattcatcatctcagcgtgcgtcagcgcgtcagcttcagcgtttgagaatggcacggactgacctgtcgtacatcccaaggaggcccgtgcgctatactcgccttgtggcctaatctgcgatcaacccatcctcaacgaaagcgcaagtagcgactaagcacactatctttcgggtcggtgcggtcacagtatcggcatctctgtctttagctacgatggtgtgcgtgtaactgatcagtacacccgctgtatcaaaactctatcttcaatccgctaagaatcgtcaccatcagtacatcagtacatcagtgggctaagatctaatggtgtcgttcgacggccgcgggcactagccacgagccaagagcggtacagttgctgcgaaatggtgggcagcctgacaggttcagtttgaataggatgaaaacgccatgaagaacagagaagctggcaattgacgatagtggggcgagcgcacgctgcttgctggtccgagcgtaggacgaacgacaaaccatgggcggggccaccaggccccagggagggcgtcactggttggatgtcgtctgttaggctagagctcaggcgctcagggcctctggcccaagcctcggacgcaagcctctgacgagcgagcgcgcgctggggcgggtctgcgcaggaacggcaggactgccgagttggttgaatattgaatggttggatgattggtttgctgggtttggttttgacacgcacggcacaggacaagtgagtttggaggttggatttgcgcaggtagaaagggcgctcggcctcagggcctcagcgtcagcagacgagctcgccagtccaggtcagtacccagtgttcgttacttcccaccgtccagagtttgctgctgcctctcagcttgattcgtgtcggagaagtagaaatggtcacagcgtaccacacactgtccccatgcctgcgtcctgctccacgagtgtttagccacaaaaatttatggacaaccttactgagcctgtgctggggggtgctttagcaccagcactggcgccatggcgtcaaggttaattccactgtcattcgacaaccttcaactgatgggggcaactgggcacaaaaccttggatatataaccaactccaactcccacggttttttaccttttgctcttctccccaggactcactacttctactcctctattcatcttcaccaaaatgaacattccgaccaagatgaaggcagtcgttaaatcggaggcaggttatgacaatatgtccctgcaagagattcctgtcccagaagttaagggaaaacaggtgttgatgaaagtcgcctatacgggtatctgcggtacggacattcatacctttaaaggcgagtacgccaatgccgtgaccccacttgtcctcggccatgaattttctggcaaggtcgttgccgtcggagatgaagttaccaaggtcaaaccgggtgaccgagttacctccgaaacaacatttgatacatgcggagagtgtgtgtactgtaaaaataaggaatataacctgtgcgaaaaccgttcgggtattggtacgaaagccaatggatcgatggctaattatgtgcttacgcgagaggagtctgtgcatgtccttcctgacaatgtttcctacaaacttgccgcgatgtctgagccgctggcttcctgtgtgcacgcaatgtaccagaaaaccccgttcacccttcatgatacagttctcattatcggccccggacctatgggtttgctctctctgcagattgcaaaggaaattggagcctttaccatcgtctccggtattacgaaagacagcgaccgcctggaaatcgcaaaagaacttggagccgacatcgttgttgacacgcagaaggaagacttggcgaagatcgtcatggaggctactaacggagtgggagttaccaaagtctatgattgtagcggcgctacaccagcggtgaatgctgccctcccccttctgaagaagggaggtacttttcagcaggttggcctgtttgcaaagcctctgaacgaattggatgaacgtacaattattcagcacgaaattacatacgtgggatcccgttctcagaatccgtatgattggcctatcgccattcacctggaggccaaaggtgctattaatgaagataaaatggttacgaaagtcttcgatttggatcattggcgtgaggcattcgaggctatgatggctggaaaagaactcaaggttcttattgccagcaatccagacgacgaaactcttaattaacacggatcaacaaaaatgtgcgccagctttgttgtgtgcccttttcctctagcggatcctatccacatttcgtgaatgaaccgattaagctctgacgagatttccttgttttctgtagatacctcttgtagaggtgtcaaagttatgttgtgatcgagagagttacctgcaaggtattatgcaagcggcttgatgaggacactcaactacgtgtgagtaggagtgcgttgctcagcagttgacgcgtgagccgcttgagcagcttgataaaggtcctaatcgtcttccagctgttggcagacgacaatgtgctgtagtagtaggataggcccgtaaaagtgtagaagcaataggttgagactgactgtaatgggtacttgcgttcaaagactgaaagtccaaaggattgctcaaaggcccctgaggtctgagcctctgagcgcgctcttcgtcaaaattcgccggggccatcggtcatcctctcgagggcagcatcttcctgcttgaagactgagtccgtctcagataacttcgtataatgtatgctatacgaagttatcctgcaggagctcagaccttgcatgttagccttgaccttgcctctatgaccactaattcgcacaagattgcacgttaccattgtcatcttgccatgtatccaatgtttcctgtttgccatagtacgtagtagatacatcgatcatcgatgcagatgacgcagatggcattggttcgctttgccctatgcatgcatcatgcatcatgcatcatgcgtcatgcgtcactatccatattaatcattgccctctgtactaggccatgacacctgcagacccttccccagggatgcttcttgtaatagccaatatactacacaactttaccgattacgatcgagatcgatctcactatagtttgtcgaacttcgatgcacatcgagggtgcggaaaaaagctgacggaagcggaagtgggtgaattggttaatttagttagattggcagggttgttcccaagattcaacgcaagctgagaaagaaaacagaaacacgaggcataaggccagtcagaaaatgcattacgaggggagttgaagtgactgtgggccagtgcctgggtcgtcatgtgcaaattttttcttcggttagactgccgcagcatgcagcaactctgccggccctatataactagtgcttcatcttcttgtcattcttgtctctttaccaacacaccggtactctttcaccatgggtaaggaaaagacacacgtatcgcgaccccgactcaactccaacatggacgcagacctgtacggatacaaatgggctcgagataatgtcggacagtcgggtgcgacgatctacagactctatggaaaaccggacgcccccgagctctttcttaaacacggcaagggtagcgttgcaaacgacgtaaccgacgaaatggtccgtctgaattggctaactgagttcatgccactccccaccatcaagcacttcatccgtacacctgacgatgcgtggctgttgactacggccatccccggtaagaccgcttttcaggtcctcgaggaataccctgactcgggcgagaacatcgtggatgccttggctgtgtttttgcgccgccttcactctattccggtctgcaactgccctttcaacagcgaccgtgtttttaggcttgcccaggcacaatcacgcatgaacaatggtctagtcgacgctagtgatttcgatgacgagcgcaacggctggccggtggaacaagtgtggaaagagatgcataagctcctgcccttttccccagactctgtcgtgacgcatggtgatttctcgcttgacaacctcatctttgacgagggcaagctcattggctgcattgacgtcggccgggttggcatcgccgatcgctaccaagatcttgcgatcctctggaattgtctgggcgagttctcccctagcctccagaagcgtctgttccagaaatatgggatcg

SEQ ID NO: 297 - DNA, 1599 bp, synthetic construct; identical to SEQ ID NO: 43
  source 1..1599: mol_type = other DNA

SEQ ID NO: 298 - DNA, 609 bp, Moniliella pollinis
  source 1..609: mol_type = genomic DNA
cgtcacggagagtcaccttgcgcgagtagccacctacgtcatatgcgtcatatgcgtcatatgatatttatgtttttcaatacgcttcgagcgttcgactgtttgtccgttcgactgttcgactgctcgactgttcgactgttcgactgctcgactgttcgactgttcgactgttcgaccagcttagctaactaacccattctgattcaagagcttgagcgaacttgagcgagcttgaacccttgaaccaattgcccggttgttgcctgcccctggcccccgtccccagtgccccgtccccgtcccccgatcgactggcccccatgcggcttacgtctttgcagcgggctgccggcagccggcagtggacaaccgacagcttggcgcgcttgatgcatgatgcatgatgcttgacaggcagacagctggagtgctggagtgcactgaagctcggaagctgattcgctgagtcgctgagtcgctgagttgctgaatcgctgaacctaagagtgctacgatcttctactgaataattgaatttgaagattctatataaaccgactgttcatagatctctcctttgtcccggactacctctacatctacatc

SEQ ID NO: 299 - DNA, 604 bp, Moniliella pollinis
  source 1..604: mol_type = genomic DNA
cctcctttattgaaccactcttgtggctaattaatccaatgccttgccgccctcaaatacacattgtttttaaatgttaattgaatattcaaatgcaagttgtatactctacatttttgcattcccaaccttttttttatcaacttttgtcttagctgctttacaatagttccatagcgctgaattccctttgggatacatgcacgtcagaaggattgttggcactcggaaactggtcgcagctaaatgccgaattgcctgttgctctggtgcaagtaaacaaacacaaggtcaagaaactggaataacagaatgtttccttcttgctttgattgctttgatcaggcacatctacagtatcttatggggcaagaaggctagagtaggccaaaacaagataccatcatggatggggtagtacttccatccctggtcaaccgatgagactacgaagaagacatactgttgaataattacgatgactaacgttttttggacaaggggaaagaacgtagcgtagctgcttcagaatgaatctaacggtagatcaggatctgaatgccctggttgaaacgcttgagaacctgagagcctaagatccatg